United States Patent Application Publication US 2026/0058010 A1 - sequence listing, part 37

SEQ ID NO: 434 - DNA, 444422 bp, Homo sapiens
  source 1..444422: mol_type = genomic DNA
tgaatgaagactgaggtacataagtgagaagtcctgtaaaattgataatccttttcattttgtcacaaaagtccctacttacattctaaaattccattaaatgtcacctttctgatatccccattttatttctctctctttgggcatttaccatgctgtagtgtactctaggccattcctagctttgtaactctctcaaggtgactctgcaggagatgcaaagtagttaagaggagaacccccaatactgatgtgtttataggtgaggtggtctgatgtcttagatttgctttaaaatattcctgcacaaaataaaaaggggaatagatgaaacaagattgacaaaatgttgattcattgacgcggtgtaatgggtatctgggtgatcatagtacaattttatctcttttgtatatattttaaaatttccataatatagcaaaacatgagcccagtccctcaaggcagccagatttgggttcaaaccctagtttgaccttttactcgctgagtgactttaccctgctacagcttcagtttctccaaatggaaataatatatactccattaaggttcttgtaaactctcaagtaagagggaatctgaggctctagcacacggcccggcccttaatagttgtactaatttttattttatttttcgaaacggagtttgctctgtcacccaggctggagtgtagtggcatgatccggctcactgcaacctccacctccagggttcaagcaattctcctgcctcagcctcctcccgagtaactgggattacaggagtgcgccaccacgcccagctaatttttgtattttttagtagagacggggtttcggcatgttgtccaggctggtctccaactcctgacctcaggttatcctcccgcctcggcctcccagagtgctgggattacaggcgtgagccactgcgcctggccagtagttgtactaacaagggtttctgcttgcgagcaacaaagactgactctagttgtggctaatttctttcacacacacatattaagtgccagaggtaggacttgagctcggatctctgatttccagacctagaactttttatgtgttattacagtcgttaaaaaccttacctggatttgtgctttgcaatttacgctttcgaacatgcaggaatgtagtttgggcatttgtctggaacttcggattctcgggactccagggtggccaaggcgcggaggtgactcaatgacattgaccggcctggatgcacgtgggttgctgagccgatgctgggaaggtacggggtttgcccggtgcaggccgccggaactcacgcacgcccctgtctctctcactcctggggtcggctctggccggtggcctccagctcagctagcggccggacgcgcagcccgccgactagccctccaggtcctagcgcgactcccggatcccggatccggcggatctggccgaccactcaccctcccctttccgcaagttagggggcggggcatcgggtttctggctcgtgatttgccggagctcctgcgctccccttctccaccccctccggctgtgtgagaggtcagcagaggggcggtctgcggggacaacaatggcggggttctgggtcgggacagcaccgctggtcgctgccggacggcgtgggcggtggccgccgcagcagctgatgctgagcgcggcgctgcggaccctgaaggtgaggagcaacggggcctcgcgggtccgggcttcactgggcttctagccgtgccgcctctgggcggctggcgccgggagagcgctggctgggtccggctgcccccgcgccccggttccgcatcagctacaccgcttgctttcctccctcccggagttcgcgtggcagcgggctcaggaggcatccctcgttgcagctgttcctcgcggggatcctgcggagcagagaggcctagggcagaggcagttgggtgcccgcacgccctccgaggcggctgatggctttgggcaggcatattgctcgaggtctgcttccagggccccgcggcattggctttgtcttaagctttccagggtgtctttttaggtgtccttatagtttccgtgttctgttgcctctttccagcatttttgaagggacactgtgaactgttgcttaagtagtgttagggttgtgagtttgtcttatcttttaaagtattataccatgtcaggactgccaatagattttacgtttcatttgaaagcctgttttaattgtatgacaccccagtctactgtgtaccaaatgcatcccgtgaacttactttccttttcggtatagtggtgagcctgattttggcactgttctaaacacatttcatgactgttctgtatacctaggctgtcatgatggcagattgacaaacaggttggagtgcttgtgtgtgcttctgagctctgtctccagtcaatgtcgagtctgtcgttaattctggggcacagaccacctaacctactttataaggtttgttgaggcacttgaacacattctttaaaatgaaggtcccctgaaaaccatctgtcagctggttcagtgtgcttgttaaacttccttttaaaaaataattattaaaacattgccacataacttgatttatagtcatttaattttagacgttgaagacactttagagacgacctgccccatcctactctttaaagaggagggaaccgagccccaggtgggcagtatgagagctggagcttatcgacatggaagtgagtggcacctatgtttgttttgtgtccaattcagcgtgcggactttcactgttttctgtgttcccatacagtttagtgttctttaatctttatcattctgttcatctgtgttggccacttcaattgcagctgtaagacttatgcatttacataggaggcaagttagtatggtgtaaagtgtgggctttggggtcaggcgcatgaggctttgtatattggacaggtctcttccttgggcgtcagcttcgtccttgtagctatttttttcaacaaatatttactgaatatctcctgtcttccacttctggggaatgaatatggtttctgctttcttagaaattttactctagtagggagactgtaacaagtgtaaaatggtattaggggagatgcccgggtgctataagaaaataaaatagagggatttgaccaagccaagattttgaattctgtgttctagatactgttctgttgctttgcttgaactaatttattcaatctcacaacagtcgtatgtcccccatttacagaagatgaaagtgaggcactgagtgttaatgtgacttgctcgaagctatagtgccaataagtggcaaacaggatttagaactccagaacctgtgctcttaatcatactatgctatctacggtaagggagtgttttcctttggaactgaaaattgagacaagttttgaaggatgaagtgaccttttctaacaaacagagatgaatgttataggtgagagagcagtgtatgcaaaggtcctgtggccagagggaatgacaggttagaagaactgaaaaaagcctacagaggctctgatgcagagagtagatggtgttggggaagctggcaggagtcagaccatctggctcttatagatcacattatgaggtttggtgtttgtcttagagcagtgggaagacattgatgttggaggtgggagggatgacactgacattttagattggagaggctgagaggaaggctgttactgtacttactgttgtacacttgttatacacttactgtgtaatacatacgctttgatgattcttacctggttttttccttttaatgtgttggcagagactgcatcttgtctatttctgtgttcttagtacaatgtttgacacaataggtgctgaatgtgtaacaatagagtagcattatgtttgtgccggtaaagaattcctccttggggtgggaagcatctctgaagttcactatcactctaggggaacttgagctgctgcttagcttctctctgcgcttctcttctatgaacttgaaatatgctctactgagtctgtttgaagctgaatcttttgaagattttaacccctcccatccctccctccacctctgcaaaccttttggttggttgaaaagcagccagctaactctagggtctagtctagagaattctgaccattcttttagccagtcaacagagtttatttatttttagggtatatgtagagttcaccttttagtcttatttgttttgtgtatcagctttttaagcacattctgttttaatgcctagttttttcttctgcgtaaatgttttcagtggctctaggatgttggttttatggtaattgctatagttattattgaactcttatatgccttgcatgatttttctttgcttttctttttttttgagatggggtctcgctctgttgccaggctggagtgcagtggcgcgatctcagctcactgtaacctccacctcctgggttcaagtgattcccttgcctcagcctcccaagtggctgggactacaggcgcacgccaccaccaccggctaatttttttttgtattttagtagagatggggtttcaccatgttggccacctcgatcttctgacctcttgatccactgccttggcctcccaaagtgcttggaattacaggcatgagccaccgagcccaatggtgtgatttttcatatatcttttatccttataacaactaggtaaaaaatcccaattttacagtagaggaaacaaagctcagggcagttaagtagttgcttaaaagcacaattggctgaagtagaatttgaaccttagataatatgattctgaaggctttcttttctttcttccttttttttttttgagatggggtctggctctgttggccaggctggagtgcagtggcatgatcttggcctactgcagcctctgcctcctgggctcaagccatcctcccatctcagcctcccaagtaggtgggaccacaggcacgtacgaccacacctggctattttttaattttaatttttattttttgtagagatggggttttgctatgttgcccaggctggtctcaaactcctgaactcaagcaatccacccacctcagcttgcttttctaattacaaattgtctcatttgaatcatggtctcattgtgtgatgcattcatgaaatttgaatgtttaagccctgtgttacttgacatccattattttcttttgtaatcagtaaatatggaaaagaatgtttaggcttatatgaatgctttagaattgcctggaggttaatgtttccaacatgctgataaatttctgacaaatcatttgggaaaagaaatttctgagattattacagaaactagtttctggtgtaaaaaaatgtttatagacatttatatatttatacatctaccatttggattttattctgttcctgagaggttcagaacagaggtaaaaactgctctagtccttttctaagaggaaaagatgtgacatttttgatgaagagtgagggaaaaggatttgtttaaatgattccaaactttaaaaaatgtaggtgggagaacaaggatgaaaaaggaatttgggaagaaacacttttttggtggggctggaaacatagtgtttcattgtaggtatctggagttagatgcccgcaggagccatgctgaggtgctgggtatcagtggctggcttttgggccagggatacgaggctagagttagagttagaactgtgagccctgacggatatagtgagtcagttaatatttaattgaataaatgcttcgttttataaccctaaattaggatttggaagaaggaagaagagacaagaggagttagaggtatggtttgagaggagccaatgtagtgtagtgttaccaaacctaggaaagaaatttcaagaagtagttagcattcattcattcatttgtctagagatctagctctttactcagaaagtgtttgtggagcattttctaagttccaggtactatggcacgtacagaggagagaaaaagaaattaaaacatattccctaactatgtcccaggtgcagagaggctaaggaataaaagattgatgaggccaggtgtggtagctcacgcctgcaatctcaaccctttgggaggccaaagtgggaggatttcttgagctcaggagtttgagaccagcctaggcaacataatgataccacccccacccccggctatctctacaaaataaaataaaataaaataaaaattagctgggtgtggtggcacgtgcctgtggttctaggtacttgggaggctgaggagggaggatcacttgagcccaggaggtcaaggctgcagtgagctgtgatcacaccaatgtactacagcctgggtgacacagcaagaccctgtctcaaaaaaaagtctgggcacgatggctcatgcctgtaatcccagcactttgggaggccgaggcaggcagatcacctgaggtcgggagttcaagaccagcctgaccaacatggagaaatcccgtctctactaaaaatacaaaattagccgggcatggtggcgcatgcctgtaatctcagctacttgggaggctgaggcaggagaatcacttgaacccaggaggtggaggttgcagtgagccgagattgcaccactgcactccagcctgggcaacaagagcgaaaatctgtctcaaaaaaaaaaaaaaaaaaaaaagattggtgaaagaatttgaaaagatctttgatctttaatgagaataattttagtagcatggtaaagtgttatatacaaaaaatactgcttttgacaacactcttgaatagttgaagcaaaattatattttttgaaagataagcatattgcataactttcaaaaattagtttctttattttaaatgcctattgacattttcgttagaaaaaaccccacaaactgatgggatcaacctaataagatcaaaataaaagtgaatttaaagaatgttggaagatacagttttgtgatttcattcacaaaacctaatacagcatccatgtggcatactctctttggtattgtttgtttgtttttgagatagagtctcatgttgtccaggctggagttcagtggtgtgatctccgctcacggcaacctccgcctccggggttcaagtgattctcctgcctcagcctcctgagtagctgggattacaggcatgtgccaccatgcccagctaatttttatatttttagtagagacggggtttcaccatgtcggcctggctggtcttgaactcttgacctcaattgatccgcctgcctcggcctcccaaagtgctgggattacagatgtgagccaccgtgcctgccctctctttggtattatttattcaagaaacctttggtttcctagagctgctgtacaaatgaccatggacctggtggcttaaaacaacaaattcattctcccacagtactaaaggcctgaagtctgaaatcaaggcatgagcagggccatgcttcgcctgaaggctctaggggagaatcctttcttgcctctttgagcttctggtggctgcattcattccttggcttgtggctgcatcactccagtctctgcctctgtcttcacatggctgccttctcctcctccttcttgtgcgtctttccctctcattcttttataaagacacttttcattggatttagggccatgacaagatctaggatgatttcatctcaagatccttcactttgttgtattggcaaagacactttatcacaggttccaggacgtggacacatcattttaggggctatcgttcaattcacctacacgtagtatgtgtcagacactacttagagctgggaatataattgtgactgtttctgctcccattgtggttacatttgagtaaggagactgtgctcgtataaatagaaaagttcagagagtgagaagtgctctcgaaggaaaaagataggttaatgggatagagagtggtagtggtgctgagttggggatgttacctaatgagaccatgggggacatttctgagcatgtggcatttggacaggaaactgagccagccagccatgtgactatatgggggcctagcattgcagaccaaggagtgccagggcaaaagctctgaggggagattgcatttggcataattaagggatgaatgtggctgctgtggttggagtgaactgaatgagggggtgatcttaggagatgagggaggaggagtgggtaggcgggacagagtcatcaggggcttgtatttggaatttagtaatgagagtccagttggaggcatttaagcacattgaatttatgtttggaaaagacgtttgtgactagtacgtagcgaatgtcttagtaggggtgggagtaggattggggactggggtgggaagagtggaaacagagagacccatcaggaagctgttgtagaagaccaagctagagatgatggtaacttgtgctagggcactggagttgctgagaactggtcagacttggaatgtattttggagctagagccagtatcttgctgtggggtttgaaggcagatacagatgtacctcatatcttggctttattgaccctgcagatactgctttttttttgttgtttttacagattgagggtttgtggcaaccctgctttgagcaactgtattggtgtcatctttccaatagcacatacttacttggtgtctctgtgaaacattttgataattttttcattattactatgtctgttatggtgatctgtgatcagtgatcttcgatattcttattgtaaatattttggggtgccgtgaaccacgcccatataagttggagaaacataattgataaatgtgtgagttttgacttctccaagcagttattcccctatgtctctccctctcctcaggcttccctaattctctgagatacaacaatattgaaattaggccaattaataatcttctaagcgttctagtgaaaggaagagtcacacatctctcactttgaatcaaaaactagaaatcattaagcttagtgaggaaggcctgtcaaaagccaagatagactgaaagttgggcctcttgtgccaaattgtaaatgcaaaggaaaagttctggaaggaaattagaagtgctactccagtgagcgcacaactgattaaaaaaagtgaaacagctttattgctgatatggcgaaagctttagtggtttggatagaagatcaaaccagccacaacatttccttaagccatagcctaatccagcgcaaggtcctcgcttcagttctgcgaaggctgagagaggtgaggatgctgcagaagaaaacttggaagcagaggttggttcatggggtttaagaaaagaagtgaggccgggcgcagtggttcacacctgtaatcccagtactttgggaggccgaggcgagtggatcacaaggtcaagagattgagaccattctggctaacatggtgaaggatcagatgattgttagcatttttgagcaataactgttttgaacaataattaattggacctgaacctacagtatctgtaaggtatgtacaaacagggaaaggaaggaattaagagtgacttttgaagggtagacacacaaggtcgctattgtgtgattttgtgtttatatgcagtctccagaatagactgatccatgaagacagaaagtagattagtggttgcccagggcctggaggagaggggatgggagtgactgcgaatagttaagggttgtctttttggggtgataaaaaatgtcctggaatcagtagccatcatggttccatgccttgtggatatactaaaaaccacggagttgtatacttttttaaaagggtgaattttatggtatgtgaattacatctcaattaaaaaataaaagaatggtccgggtgcagtggctcacacctgtaatcccagcactttgggaggccgaggcaggtggatcacctgaggtcgggagttcgagaccagcctgaccaacatgaagaaaccccatctctactaaaaatacaaaattagccaggcatggtggcacatgcctgtaatcccagctactcgggaggctgagacgggagaattgcttgaacctgggaggcagaggttgcagtgagccaagatggcaccactgcactccagcctggcgacagagtgagactccgtctcaaaaaacaaacaaacacaaatcttcgaatacttatgttaacaaagtaaagcaaagaggccaaggtgggaggatcacttgaggccagcagttcaagaccagcctggggaaaatagtgagaaccccccagccgcccagtctctacaaaaaataaaaaaattagtggggcatggtgacatgcatccatagtcccagctattcaggaggctgaggtgggaggattgcttgaatgcaggagttcaaggctgcagtgagctatgatcctatcactacacttcagtctgggcaacatagtgagatcctgtctcaaaaaaaaaaagtacaatgaagctaggtgtggtggcagggatgtgtagtctcagctacttaggaggctgaggtgggaagatcatttaagcctaggagttagaggctgccatgggctataattgtgcctgtgagtagtcactgcagtccagcctgggcaaacatagtgagacccccatctcttaaaaaaacaaaaaaagtaaaataaggtgaaattaatatattttacttaatatattcaaatattcaaagtattatttgaatatgtaaatgtaaaaattcactaatgaggtcttttacattttctgggtactaagttttcaaaatccagtgtgtagtttactcttagagcacatctgaatgtggctcgtggctgccatattggatggaacagctctagggcacagattgtgctactaatcaagtcccaccttgaggtgctgggactggccttttgaatgcagtgttagtcagcccttggccaggcagggtcgggggagctctcaggcttgatggagagctgtatagttgaggaacatggtcgagatgagggtgcaggtgtgagccgttagttgtcaacacagcagttagagaggatctgagtggccactgacaacatctgctacagcgggatggggaagaatggcctggcggaagagtcaagggtgggatgatggagctctagagttgacatgtatagtttcctggtgcttgagcttagtacagaggcagagcccagagaatcttgagtcttgaacatctctctcaaatattaggtgttcaacttggcttttggcagacactgaagattggaatggtctctaagatcctgaagactaaatagtctatttgaaagaaaagctgtgcttccaggaaaaagccagacctaattaagtgtcttcagagaagggcatgggctctgttacaatgcatgatgaaataccgtgtcataatacatggataagaccttcacctggaattttagagatgaagcaagatgaagtaaactaatgtttactttgaccttggtgagatcattttatagctccattaacccagttttgaggatagtttcttctttgaagcagaatgcattctgataatgaatttatctcataatgagttatttagtattattcatctgaatgctactgcgggtatgttaacaacagtagttttggttttggcagaaatagtgttcagattgttctttaagatatttgccagtggatttaccagttttaactgccacgtgaggccacatcttgcttatgaaagtaggtgctatctaatcttttttttttttttttttttgagatggagtcttgctctgtcacccagactggagtgcagtggcgtgatctcggctcactacaacctctgcctcccgggttcacgccattctcccgcctcagtctcccgagtagctgggactacaggcgcctgccaccacacccggctaattttttgtatttttcgtagagacagggtttcactgtgttagccaggatggtctcaatctcctgaccttgtgatccacctgcctcggcctctcaaagtgctgggattacaggcgtgagccactgtgcccagctggtgctatctaatcttaagaaaggatttttttccagccactgcaaacaggatttgtttccctgtttgcagtggctggaaggcatgcatccagtttgtctaaaagcctaccatttcccccgctttttgtgtaagttattgtgtgctgatgataatatatgcaagactgtgctagccatgttagacattctcatttaatcctcatagcagcattatgacctagataagtactattattatccccagtgtacaaatgaagaaactttctatatatctaggaaatgtcagagccaagatttgaatccaggtcagaatctgagtctagaccagaactcttattgactatattattctctaatggtaattcccaagtggttctggtataattttaagaaagaaggtgacagttacatatttggatttagttttcatgtaaaaccttacattttttggcactttactgtttataaaaactcatttgatccttttaataactccctaggaaatcagggaggtgtcatcacctacattttgtagatggaaacgggggcccagagaaatgattagctcaatgactcacagctgagagttgacccaagtcttgtgactctgagggtcaatgccacttcctatgtgccaagccattttcaggcatttcttttctatgtgtggaaaatacaggaaatcattattcctgtgggagagaaccagtggcaatatgttactggggagtcattttgcacacgctgacctctctcattttggctgtgattggctagcctttataaacagaattgattaaagttctttctcagaacctttgttgctaggaaataccttacaaagaattttggactgggcgtgtagccagtttgttacatgcttaacaaaaacaacaaacgttaaaattctgtgtagaggtccaaattagcagacttcttcaaacgttttccttcatttagaaaataaactttatgttgtggctttacacaaatggtctgagtgttgacctgattcttcatttttgaccttccatgaatgtctcccaggaggaaacaggaacagagcctttatggggctcattccaaaccagttcagacttgtcgtgggaatggttcacattggtagttgttctgttatagttgtgtttgcttgtacgagttctacttcttcttttttttttttttgttgagacagtgtttcgctctttttgcccaggctggagtgcaacggtacaaacttggctcactgcaacctcggctcactgcaacctccgcctcccgggttcaagcgattctcctgcctcagccatccgagtagctgggattacgggcatgcaccaccatgcccagctaattttgtatttttagtagagatggggtttctccatgttggtcaggctggtctcgaactcccaacctcaagtgatctgcccgcctcagcctcccaaagtgttgggattacaggcatgagccaccgtgcccggcccgagttctacttctagttactgggtaaccgggaggcatctatgctttttacagctttaggccacattattacaagttcacatgtgtgcaagctctgtggaacaatatcatatctttgagtagatattagtgtttatctgggaattgccactgtttttcttatctagaaataaaaaatttcagaaagctcttgaccaatctgtggttaaatcttataaccattacagcctcagcctgtgacctttgaaaagttaaagtccttgggactcaactttgtcataaaattggggataatactcttgtaactcacagttatgcttgaaggaatatatgagagatagtcttgatctttaatagggacacagtaataatttcccgttcacagttccttcttgttcttggtcttttacttggtaaaggttttattttataaactatatctttttgtatcttttacctccacttttatacagagattacattttttaaattaattaaataattaattaattttttctgaggagtttcgctcttgttgcccaggctggagtgcaatggcaggatctaggctcacagcaacctccacctcctgggttcaagcaattctacctcagcctcctgagtagctgggactacaggtgtgtgccaccatgccccgctaatttttttgtgtgtgtttttagtagagacgggatttcgccattttggccagtctggtcgcaaactcctgacctcaggtgatccacctgccttgacctcccaaagtgctaggattacaggcatgagccatggtgcccgactctttaaaaaatagttgtacaaatttttcagttcatttaaaaatgttgctataagaacattttgtttcttatttgagtcgttatcatcttagaaagttctaagaggtggtacctgttggttgccttttgctggtttttttcctccatttttttccttctagctttaacagtgactactgggaagttctctctctgtctctgtctgtctctctgtatctctctatctcttttctttttctcctttcttttctctcttttcagtggggtcttgctctgttgcctaggctggagtacagtggtgtgatcttggctcactgccacctcaaactctggggctcaagtaatactcccacctctgcctcctgagtagctgggattccaggctgtaccaccgtgcctggcttagtcacttttcttaatgtttttaagcattaagatacgctttcttcacaaacagttcaatgaatgagaaatatccttgattactgatattgctttttcatatttatcagccaaaccacttctgtaccagaaaatgtgaaataagaaatcatgctgaagacatcagcaaatataaaaagaatattttattatgttctggccactgttaaatttgaagctccttgagaccaagactctcgttttgtgtttttaaaagttctgtgtggtctgtgacatttctgaccctgctctatccttttgaatgatcagaaaggctttcttcaaatttgcttggcccctcgacaattcttgttttgcttttctggagatcgttttgatgcttttggtttctcttacataccaaggggctgtgtctgtagatatgatttcccttttgtaattatatttatggtatattgcctagaactacatttattgatcagacacgttcgctagaacctaactggaagaaatatcctgaaaaaatgttctaaagcccatcaagtatttgcaatttattttgctttcctttttttgtagcatgttctgtactattcaagacagtgcttaatggtgtcccgtaatcttggttcagtgggatatgatcctaatgaaaaagtaagtatttaaaagatattctcaacaactaaattaaacttatcatggttttactttctcgtctccacactgtgttcagtggacagatgagattttgttaaggctgtgtggtcattgatcactctagcattgtgtgtttctataggtgctcagtctttaggtattctgtttttcattgtgggccacagtctgaatctttttaattttgtatttatatctttagcaaaaattgaatgcatttacaatgtgtttcctttgtttccagcagaataactaagaaaacatttgttcttaaagactgggcatttgagagatttaattaaactattgagtttttctttcatttacttaatacttttttttttttttgagatggagtcatgctctatcacccaggctggagtgcagtggtgtgatctaggctcactgcaacctacgcctctggggttcaaacaattctcccacctcagcctcctgagtagctgggattacaggcgcccaccactgcacctggctaacatttatatttttagtagagatggggtttcaccatgttggccaggatggtctcgaactcctgacctcaggtgatccacctgcctcagcctcccaaagtgctgggatttcaggcatgagccaccgtgcacctggcctcatttacttaatatttatattatttatttatttatttgtgagatggagtcttgctcttttgcccaggctggagtacagtggtgtgatcttagctcactgcaacctccgcctcccggcttcaagagattctcctgtctcagcctcctgagtagctgggattacaggtgcgccccaccacgcccgtctaatttttgtgtttgtagtagagacagggtttcaccatgttggccaggctggtctcaaactcctgacctcaggtcatccgcctgcctcgagctcccaaagtgctgggattacaggcgtgagccactgtgcccggcctatatgattcatttagattgaaggtaattttgtgtattataaatttcaggacaaggggtttctaattaaaatgctattacaataatgtttgagccttgtagggactagaagaagtgattggaaataaaatatggtttcatgccttcatggcaatgaaggcatcgaagtgggcgggagttttggttaagaagggattgttcaaggtgagtgtcatcaaaatacaactgacaggaatgattatttgagaatgacatgtctgaggtatcttctgaatcatgtgctgaagtgcgcaatactgctttccagattcttttgaatctggaggcctggaggaagaaagagtctacatatcttcagttcagtagaaatacaatgtgaaacacagttgcagggtgatatggtttggctctgtccccatccaaatctcatctcgacctgtaatccccatgtgttgagggagggaggtgattggatcatgggggcagtttcttccatgtttttctcatgacagtgagttggttctcacaggatcttaagatcttacaagtgtttggaagttcctcctttgcactactctcccctgctgccttgtgaagaagggtcctgctttccttctgccatgattgtaagtttcctgaagtctccccagccatgcggaactgggagtcaattaaacctttgtttataaattacctagtcttgggtagtatcttcatagcaatgtaaaaaccaattaatacacagggcaaatgtgattttcaattttcctttttattttttatttttgagatggagtcttgctctgtcacccaggctgtagtgcagtggtgtgatcttggctcactgcaacctccacctcccaggttcaagcaattctcttgcctcagcctcccgagtagctgggattacaggtgtacgtcaccatgcccggctaatttttgtatttttagtagagacagggtttcaccatgttgggcaggctggtctcgaactcctgacctcaaatgtcttcctgcctcagcctcccaaagtgttgggattacaggcatgagccactgcacttggccaattttcaattttctaatagccacattaaaaaaaagtaaacaggcaaaattaataatatctcaatatctaaaatgttatttaagtacataatcagtataaaaagtattaacaagacaccttagattcttttttttgggccctaagtcttctaaatccagtgtatattttatacctctggcatatctcagtttgattagccacatttgaagagcccaataacctcatgtggccagtggctactatattggatagtgcaggtctattgaattagttatgataaactccctgttatgaaagctgtagtttaatttaaaatcttcatcataggtgatatgctttggggttcatgtatccatgtgttgcattccaatctcgaagtaatcagctatcctaagtggctacactcttaagagtaattaactaacatttgttgaagaggacacattatagaggggtggaatactacaaacggttcagccatctttctccttatacactggtagccttcctcattagcgtaataactgttagaagtgggctatcagccaggtgtgatggcccacgcctgtaatcccagcactttgggagtttgaggccagtggattgcttgaggtcaggaacttgagaccagcctggcgaaaccctgtctctaccaaaaaaaaaaaaaaaaaaaaaacaccccacaaaaattagctgggtgtggtggcgtgcaccagtagttccagctacacaggaagctaagttgggaggatcacttgagcccaggaggtcagggcttcagtgagccatgattgcaccactgtactccagactgctaggctaaagggcaagatcctgtctcaaaaaaaaaaaaaaaaaaaaaaaaaaaaaaaaagaaaagaaaaggaaaaaaagaaacgggctgtcattgaggaagtttgtggtattcgtcaatatatgttattggctattgctttagggaaattctgtgcctttgtactattagaatgtaataatgtagttggcctttaattctttacctttaaggataatactcgggcccgatccctaaatgaatagttctgtgttcagccacttgtctggtggattcttgatggcttagtctgacagtatggttagccaaagcagaatattgtttttttttgcctatggtgagcctttcttgcagtcttttggagccttacaaagtacaggaagttaagattccactgaacttatcaagcaggttttatgattctttttatgtcttaataaatgtttgtatgtgtggacagagtttggtctggtacttgctttcattataacctcatagtgaagttacagaaatagctaactgacctcccacattggtgaccactggtaattactaaaaataaataaatgtatgtaactgtctgggtttagcacatttatttatttatttttgagacagagtctcgctctgtcacccaggctggagtgcagtggcatgatcttggctcactgcaacctccaccttccgagttcaagcgattctcctgcctcagcctcccgagtagctgggattacaggcacacaccaccacatccggctaatttttttttgtatttttagtagagatggagtttcaccatgttggccaggctggtctcgaactcctgacctcaggtgatccacctgtctccacctcccaaagtgctggcattgtaggcatgagcgaccgtgcctggcccaggtttagcacatttaaagagatacgagggataaaggtgtagaagtggaatctccttggaattcacttagcatgtttcgtcataaatcctgaaatcaattctgctccctgctatctttgccatctcctttgctgtgcccttgcctaaggtgactgtggagaaactgtgtttccctcagtgagtgatgaatattctttggcacctattcatagtacaggtacatgttcagactaagttggtcgcttcacccttcacttgagggctgcacttaatcagacctttctccttcccggattcctgctgtccttgtaaccattcattaaatactgacctggtttgtttatacctactgtcccaagtgcaagtagacttggtctttggtgtaatacatatttgttaaataaattgattctcgtttgaatctgttattaactcatttcttattccacattttatcagtgacttacatcatgtgcaaattatccgggtgaaatttaatcattactgaaaacgttattttttttaacttgagttttaacaagctaacttgttgtcttatgtatgttcatgagaataaggaagatttaacttatggtagcttgcttggatcaagaccattaagtttcagttggccttaagttagtgtgagccagtacagtactgtgttgttcctgtcacactgatgtgagctggctgggctcagtggcttacgcctacagtccctgcgctctgggaggccgagacacgggattccttgagaccgagagttccatatcaacctgggtaacagagcaaaaccccgtctcttaagaaaaaaaaaagtgatcttaggtgttattaataacatagtgtttagagcttgcattgttatactctgattacattatatcatgatatttctgacatgaatacctggatgtgaactctctgactttgccactagtgaactttgtaagtgatttaaggcaagtgatttggcctcatcaagccttagttttcttatttgtaaaacggagatattatcagaactgacttcgtgggattattatgctaaatattgtcatcatagccattacctgatagatgagataatgcacagaagagattcatcacagtgcctgctgtatacaaaacgtgtcctaagtgtcggctgcttaatgtccttaactgaattttgcacatttggaaagcaagactcaaagcccatggatagtgagtagctgggtgtaaactcatgcctgtccttttccagagctggtggacttacccattgtgctgtatcctttctcagaagagttgggcaagtgacccagtgtccagagttctgccgtcattccaacaagtacccagtgcagggccagctcagtcctcttggtctctgaatggagtgtggtgctagctatggagttagagcctgggagagagcatctaaacctagggaagggaaaggaagaaggagggatagagagagaatgggttaagagaaaaataacaacagcaaaaaagatccttaggaaatcttttacttcagatgacattattagtacagttatagagcagctactgccaaagttcttcattatctcttctggtacctgaattctcatctatcttcaaggatccaggatcctaatttatagttgttttttcctgagtgtcttcagggtgccttatgagtgactctccacatataggatcaagtcccagttccttgaatggcatatgagtccttccatcatctggacttttttttatcctagctttatttgctacaactctcctaagcataccatgcgcttcagtcatattgagaattccttgtagttgcttagtgctaccctcttcttccagtgtcacggcctttacacatgctgttcatgtgctcccttctctgtgtgtagcatcctgcacaaagccttattagagcatttaacacaatttgttgtgtttgtgccatattttactttgaagttgccaaatgcacttgatatttacctgtaattgttgatgcagaggggcagttttaaggttgggtttaattgatttgtatgcatattcttttataggcatagcctacctggaagaatatataggagaccagtaacagtggttgccttttgggcagggacttgggtgtctcttcagtgtatccccttttgtactttaaaaattctgaattatatgcatctatgatttatttagaagaaaattttatgtatggaagattaattgatatgattagttttattgggttttatgcgctaattggtaatacattaatagcccttaacagagaagatgtgtcaggtgcaggtatttgttttgttatagcttttccccagttagacagataggggcacactcctaaattcataacagtctggcatgtagcccaaaggggtgaagaacagtagccatagctaatgctgaatgagtatatattacatgctagacattattctaaacactttaagagtgttaattcaaatcattctcacaacctcttgtggcaggtgctgtttttacccttattttacataccaggaaatgagaggcaagaagggtgacttgttcatagcaggacacacaggaggagaacatagaatgttgggagttcagcctgggtggcttggctgcagactgactcgtaatgaccattctgctgcctgaacagaaattagaatggggattcttgcttaattcttccattgttatcatgatttgttgtattcgctgtaacaattgcttaatatgtaatttctaggagtggtgtttgtggtgattatcagatgtggtctgtttcacagttaatattaacatcatattttaaaacccatttaagaaagtgtaaacattgtgttctcaggatatgcttactgtttaagaggggtttaccatgaccatttaaatacagaaaagtagatgattatgcattctcagacctgagatgtgagcaaggctctgagtggcttcgagttttatcacattagaagtttacctatttttaaggcaggggcttggctcgggttggaggagttaagacatatatgatgtaaaggttaaaccaagacctagcaagcttttttcacttctgagattctggactttttcctgtatgttaaaatactgctctaggccgggtgtggtggctcaggcttgtaatcccagcactttgggaggccgaggcaggcggatcacctgaagtcaggagttcgaggccggcctgaccaacatggggaaaccccatctctactaaaaatacaaagaaattagccgggcttggtggtgcgcacctgtaatcccagctattaggaggctgaggcaggagaatatgttgaacctgggagacggaggttactgtgagctgagatcgtaccactgcactccagcctgggcgacagagtgagactccatctcaaaaaacaaacaaacaaacaaactgctctaggttatataagagtactttttaaaaggtcatttataactctaactcttcttttagaaatataactgacactttttttctgtagttccgttgaacttaaaaataattcacaaatacagaaattaccgtgtgctaatgtgtattacatccaaattacttggaatggtgtgttttgaaaaacgattagcttgtacaattttagagtaggaagaaaaccttactaaatagctttccatttgagtgctaccagtttatgtggaaatcaaggcctacagagattgatttacttaaagttaaataggtcattagtggcaaagctggacttgggtttaggtctctagataaacacaggatacacaacttctctactgtttggtctcagctgcttcaaaatttggtggttattcaaacttaacattggattcaaatggtgtaatctgcttagtctgggcatttttggatatatgcacaattaggtacctattctgagttactgaaaatatgccctgtcccaacagagatagcagataaattatacttacttagtatcagacttccctttgaaaacaactcatgacacttagaatttcccagaatttagaaaataaattgtcaagtaattttggccaaagtgttttttttgtttatttatttatttattttttgagacggaatcttgctctgtcacccaggctggagtgcagtggcacgattttagctcactgcaacctccgcctcccaggttcaagtgattcctgcctcagcctcccaagtagctgggattacttgggattaccagcacttgggattacgggcatgcaccatcacgccggctaatttttgtatttaaattatttatttatttatttagagatggagactcgctttgtcaccagacaggagtgcagtggcgtgatctcagctcactgcagtctccgcctcccgggttcaagccattctcctgcctcagcctcccgagtagctgagattagaggcgcgtaccactagacccagctccttttttttttttttttttttttttttgtatttttagtagagacagggtttcaccatattggtcaggatggtctcgatctcctgacctcgtgatccacccaccttggcctcccaaagtgctggattacaggcgtgagccaccgtgcccagcctttttgtatttttagtagagatggggttttaccgtgttggtcaggctggtctcgagctcctgacctcgtgatccacctgccttggcctcccaaagtgctgggattacaggcgtgagccactgcacccgggcttgaccaaagtcttttagtgtctgaaatatcatttgaagattttcttttggctacagaatatgtagatacccccattgtgaatacattaacctactatgctttaacaaagtaattatagaacccgatcatatcagatgaattttgtagttccctggttgtaaacggttatactatttaataacctattttaatattaccctaagtatttatagtacatttaatattactgtaagtaatatagtatttaatgttactctaggaagtaatgtttattagggttatattcagtgttgatgttggaaaaacttggtgttttttggtcttaaaccatcggtttaaaagtaacaatttctaatgaatgtgttttttctctcttcagacttttgataaaattcttgttgctaatagaggagaaattgcatgtcgggtgagtagaattttcgtcttattttccattttactctgaaattatttattaaacccctttaagtgtgaatcactattaatagacattaatatattttaaaataggttattagaacttgcaagaagatgggcattaagacagttgccatccacagtgatgttgatgctagttctgtaagtatatttttgctttgtttaaatcaggacttaattttgggtcaagcagaaaaagtgagacatacaggctttttttcttggcctgcacaagatacattcaagtttaaaaactgtttacttgttcactgttgtgttaagcaaaacgacagtatcacagtatcttctatatgtgccgtaagtattttcttttcatagctttaaaaacttagacagaaaaattgccaggctgattgctggtcaccaagtagatttaagcaaagcatgagaaaatttgagtcaaagattaatgaaatgtttacacagtgctcccttatgagagcactttcccccagcatagcttcagtatcactaagggaatgctacaattgtttaacctttcctaaatgcttcaacgtgttcagctgaaagtttgacaaaaatgaaaggtaggctaatgctaattggatacaaacaaaagaaggtttagcataaagcagatatacttttatttggtacttttaacacagcaggccttttttttttttttttttgggacagagtcttgctttgttgtccaggctggagtgcagtggtgtgatctcacctcactacaacctctgcctcctgggttcaagcgattctcccgcctcagcctccggagtagctgggattacaagcacctgccatcatgcctggctgatttttgtatttttgtagagacagggtttcaccaagttggccaggctggtgttgaactcctgaccttaggtgatctgcctgccccggcctcccaaagtgctgggattacaggcttgagccaccacacccggcccacagcagggattttttttagtagtaatgttatgaatgagtagaaaaaaatcccatggggaaagaatgtaaattattaaatctttatggcatgaaatataagtagttgaatactaatgcaagcattgtttctcattgtctcatactacttttgataatgggaccctttggtagggtccatcagttaatgacagggatatgttctgagaaatgcatcgttaggtgaattcaatattgtgtgaccatcacagaatgtacttacacaaaccttgatgatacagcctagtacacacctatatagtatagcctattcctcctgtgctacaaacctgtgcagcacgtgactgtactaaatactgtaggcaattgtaacacaatggtaagtatttgtgtatataagtgtatctaaacacagaaaaggtacagtaaaaatatagtataaaagataaaaaatggtacacttgtatagggcacttactgtgaatggagcttgcaggactggaagctggtctggatgagtcagggagtgatcaaaggcctaggacattaccgtcactactatagacttcataaacactgtatacttaggctacacgacatttatagaaaaatagttttctttcttcaataataaattaaccttagcataccataacttttttaaattataaacttttaaattttgtctttactctttgactctttcttttttttttttttttgagacagagtcttgctctgttggccaagctagagtgcagtggtgcagtcttggctcactgcaacctctgtctcccgggttcaagccattctcctgcctcatcctctccagtagctgggattacaggcatgtgtcaccacgctcggctaatttttgtatttttagtagagacggggtttcaccatgttggccaggctggtcttgaactcctgacctcaggtaatccacctgctttggcctcccaacgtgctgggattacaagcgtgagccaccacgcccggtttactctttgactctttcataataaaacagcataaaatgcaaacactgtataactgtacaaaaatgttttctttatatccttattttataagcttttttctgtttttaaagttttttatttttcatttatttttgactttttgaacttttttggtaaaaacgaagactcaaatgcacacattagcctagacctgcagaggatcaggctcatcaagacatcagtaggcatgggatcacatcaagttagaaagcttctacacagccaaggaaacaacaaaatgaagagacaacccacagaatgggagaagatatttgcaaactacccatctgatgagggattagtaactagaatgtataaggagctcaaacaactctataggaaaaaaatctagtaatttgattaaaaaatgggcaaaatggccaggtgtggtggttcacacctgtaatcccagcactttgggaggccaagcgggcagatcacttgaggtcatgagtttgagacctagaataaataaatggatgtttaaccagcctggctaagatggtgaaaccctgtctctactaaaaatacaaaaattagccgcgtgtggtggcacacatctgtagtcccagctacttggagactggggcaagaagcttgaacctgggaggtggaggttgctgtgagccaagatcgtgccactgcgctgtagcgtgggcgaccaggcgagactatgtccaaaggaaaataaaaaggggcaaaagatctgaatagtcatttctcaaaagaagacatacaaatcacaaacaggtatatgtaaaggtgctcgacattactgatcattacggaaatgcaaatcaaaagtacaatgagataaaatcttaccccggttaaaacggcttttatccaaaagacataacgagtactggcgaggatgtagagaaagaaccctcatatgctgttggtgggaatgtaaattaatacaaccactataaagaacagtatggaggtttctcaaaaaactaaaactatcatatgatccggctgctagatgtacatctgcttctaggtgtacacctagcaccagggaaatcagtatatggaggagatatctgcactcccatgtttattgtagcatttttcacaatagccaagatttggaggcaacttaagtatccatcaacagatgaatggataaagaaaatgtacatatgtacggtaccattcagccatagaaaagaatgagatcttgtcatttgcaatagcatggatggaactggtggaggacatgttaagtgaaataagccaggcacagaaagacaagttttgcatgtactcactcatttgtgggagctaaaaatgaaaacaattggactcatagagagagagtagaaggatggttaccagaggcttggcagggtgtatggagcgggaggggtggggatgattaatgagtacaagaatatagttagatggaataaataagatcttgtatttgatagcacaacagggtgactacagtctgcagtaatttgtggtacattttagaataatttagggaatagaattgggatgcttgtaacacaaataaatgaatgatttagatgatggctaccccatttatcctgatgtgattattatacattgtatgcttgtatcaaaatatttcatgtactccataaacatatacacctcctgtatacccacaaaaataaaaaaagacatcactaggcaaataggaatttttcagctccattattggagctgaaatgtagatgcagtacattaccgaccaagctgtcatatggcgcatgattgaattctgatctacaggtagacttttcagactttgcaaaagtggtttcaaaagaattgttgttaggtttttctcatttgtaccttccctgaagcagatgtggtagttttacattttagagacttttcaccacttctggctgaaagcagtagggaatataccagagattatgatacataatttataataaaatttaccagaccccacaatggaagcaattgcacactcagtcaaaactttctcttactatgacctactttaggtcaatttctagaaagatactataagtaaaagcaggataatgatggtgggaatgtcaaaagtttcatttaaacctcaacagtagggtcaaatctgctatgtggtttctgtttcagtctcaaggaggctgaaaaggtgaattcctgtaacagcatcttttgcatcctcagcacgtgatcacagaggttactatcatagctaatcagctttataatatcagtaatatgaaaaagccatgctattcagatgtattaatttttgcatgtttgttttcaagaggtgagcattttaaatgtaacttggagtaaaaaactttataggctttgtatgttaatttcacatgtggaaatgtaaatactattccagtaggaaaatactgcaacaattgattgcaaaagctattcattgtctattataaacaactaatttttaaggtaattatgcaaggaaaaagatgaatggatactgcacatatcaactaataagtcacacaaggaaggaaagccagctaacttgcaaacaattaatgtttgatagaaaaatgttggcttttagagatgattatgcagtttacctctgttggtcccttccctccaacatgttcttcaaaattgtcttcagtattcttggtccttcgctcttccatgtgaattttaggatgagctggccaattaccccccttccccaatttttagataccatgaacaagatttttataagtataacttttgcatgtctttttgtgaacataattttgattttttttgggtaaatatctaggagtggagtagctgggtcttagggtagataaggagttggcaacctttttttgtttgaaagtaaatacatttttgtctggatagcaaatatattttagattttgcaggcccctgtggtcgctgttacatatgcttctttttgttttgttttgttttgttttaacaacactttaaaaatgtgaaaactattgttagcttgagagctgtgcaaaaacagcccttggatcagatttggccagtgggtagacagtattttgctgatgcctagaataaatacatgcatgtttaaatttataagaagctgctaaatagttctccttcatggttgtatcatattttactccctccagaaatgtctaggtcagggtgcttttgtgtccttgccaacacttggtgttttcagtccatttgattttgtgttttatttttaagtggttgtgaagcagtatgtcattgtgtttttaattttagattttcctgatgaatactgatgttgagtacttttttgtgttattggtcattcatttatatttttttctgaagcatttcttcaaacataatgaaaaaaattagaaaagtagtaccagtatattggtatcagtttactgttatataccagtataacggtatctgtatacccttcacctagattcagcaattgttaacattttggcttgtttgctttatatttgtatccatatgtacattgtgtgtgtgcattttttttttttttggctaaacaatttgaaaataagttacaggacatggatgaagctggaaaccatcattctcagcaaactatcacagggacagaaaacaaaacactgcacgttctcactcataggtgggaattgaacaatgaagacacttggacacagggtagggaacatcacacactgtgtcctgttgtggggttgggggatgggggagggatagcattaggggaaatacctaatgtaaatgacgagttgatgggtgcagcaaaacaacatgagacatgtatacctatgtaacaaacctgcacgttgtgcacatgtaccctagaacttaaagtatatatatatatgtaaaaaaagcagcattaaaaagaatcccctggacaggaaaaagaaaaaaaaagaggccgggcgtagtggctcacgcctgtaatcccagcactttgggaggctgaggcgggcagatcatgagggcaggagatcgagaccatcctggctaacacggtgaaaccctgtctctactaaaaatacaaaaaattagccaggcgtggtggcaggctcctgtggtcccagctacttgggaggctgaggcaggagaatggtgtgaacccgggaggcggagcttgcagtgagctgagatcgtgccactgcagtccagcctgggcgacagagcaagactccatctcaaaaaaaaagaaaaaaaaaaaaaaagaaaataagttacagacattgtggcattttacccgtaaatactattcatctcgcagtaataagtatggttttctacatatctataataccttatgaaacctaagaaaataactcattattctataatatcatgtaatatgcctaccacattcaggtttttccagttgaccccagttgtcctttttaatatttttctttgatccacagttcaatcaaggttcatgagttacatttgtttattatacctctttagtctcttaatctaaaatagtgcccctattctccctctttttttgtttgatttttattatgttggcttttagatattttggctttgtatggaatctattttctcatgaatagattcagattaaatatttgacaagactacttcataagtgatgttctttctttttttcttttttttgtgacagagtctctctcagttgcccgggctggagtgcagtggtgagattataactcactgcagcctgacttcctgggcacaagcgatcctcccaccttagtttcccaagtagttgtgactacaggtgcatgccaccacgcctggctgatttttgtattttttgtaaagatggggtttcaccatctttcccaggctggtcttgaactcctgggctcaagagatcctcttgccttggcctcccaaagtgctaggattacaggcgtgagccaccgtaccccagccagtaatgttattttttttaatagtaatatcataacaagaggttcttaatgttgaattgttctgttgttatgctaagtatgatcatttggtttcatcaggtcttcccattataatggtacattttctttttttttattaaataatttttggggtgagtttttgaatccttgtgaatattttgtccctcaaccacctctcatctaatgtttttgcatcgataatgaaaattgcctgagcctgattactttggttacatttgtcttgtttgctgtctgtggagtaagctgttgattttctgctcctttttgaatctgcctgtttttatgtattatcttttttcttatgtatttgaggcctttagtatatttatttttagcatatttaatttaaagaatctatcatattattgtattatttcaagtttgtgggtgtttatttctattcctgactcttcctcataacatattgtttcctcgcatgtttaaattttggtgtgtgattctatgtttggtgcttttgttgttgaatttcaagatggtttgggttatggatttggccaggtaggataggtggtatatttgtttccatcacaccctccagggtatcactcatctgggactaatttttatattaaatttttggcataaagattgtcaaattttgaagataatgggaagaacaaaatgagattgcacacacacagatacacacctgttgaataggctcatggtttctaatatctagagacattttcgtttactttgaaccacagagatacgagcatagggtttatcctctctatttcgtaggttgattcctcccccacaacctttcactgagaatgtaatctttgagcctcctggctttagacagaagggtttccttcaaacctccaactcacacgggatctgtttcctttctctgatcgttaaaacccaatcttctagattattgagattcccaccttcactctccaagactggctcttgtggatgcagactgattttcatttttatattatttatttatttatttatttgagccggagttttgctcttgttgtccaggctggaatgcaatggcgcaatctcagctcactgcaacctccatctcctgggttcaagcgattctcctgcctcagcctcccgagtagctgggcttacaggcatgcatcaccaaactactgaattttcagtagagacagggtttcaccatgttggccaggctggtctcgaactcctgacctcaagtgatccacccgcctcagcctcccaaagtgctgggattacaggtttgagccaccatgcccagccagattttcagattactttttttttttttttttttgagacagagccttactctgttgcccaggctggagtgcagtggtgtgatcatagcaaactacagccatgaactcctgggctcaagtgattgtcctgcttcagcctcctgagtagctgggactacatgcacatgccgttgtgccctgcttcctttttctttttcatcccttgtagtttttttgtgagccaagctcttcatttgaaggatgtttgttatatttaatctaggtctttagatgtttctaaggaggatttgcaggttatttagttggcttattgttggtttgtcttaaaacaatatgacatcctattctttgttgaggaaattcccttaatttctttgagaaataaagactgatctagagcagtcttaaagtcaggctttccctaggaaaacaattcatttataatgatgagattaatgtgcctgaatccaggggatgaggctatagggaagcagtataaaatactccaatgggaattggtcagggcaggagaaagcaaaatgggagttaagcctcttattaagtcatgaatttttttttatgtttcattttccaggccctaggaaagcacgcttattattctctgggaagatttgtggagaatagtttatgaagagaagacaattctagtgcaagaatgtaaccagctgggattttgattgatattgcattgtgtctgtagatcattttggagtgtatagctatctcaacgtttttaagtcttcctatccatgaacatgtgatattcttccatatttaggtcacttggatttctttcagcaatgttttgtagtttcatactactataagtgtaattagttttttaatttcaattttttaaattagttgcaagtctgtagaaatacaaatgattttcatataatgattttgattcctgtaaacttgctgaactcttttattagttctaatagttttttagtggatttcttaggttttttttttttttttttttttttaaagatggagtttctgtcacccaggctggagtgtcgtggcatgatcttggcccactgcaacctccacctcccgggggtcaagtgattctcctgcctcagcctcctgcgtagctggggttacaggcatgcgccaccacgcacagctaatttttttgtacttttagtagagatggggtttcaccatgttggccaggctggtctcgaactcctgacctcaagtgatcctcccgctgtggcctcccaaagtgctgggattacaggtgtgagccactgcgtctgggccttaggattcttttttttttttttttctctcttgagaccgagtctcattctgttgcccaggctggagtgcaatggtgcgatcttggctcactgtaacctccgcctcccaggttcaagcaattctcctgcttcagcctccggaatagctgggactacaggcatctgccaccacacccggctaattttttgtatttttagtagaggtggagtttcaccacgttgaccaggctgggctcaaactcctgaccttgtgatctgcccacctcagcctcccaaagtgctgggattacaggcatgagctactgtgcccggccaggattctttatataagatcatgtcatgtgtgaatagagatagttttacttctttccatctggatgctttttatttcatattcttgcctgatttctctggctttaacttccagaacaatgttgaagaggtgagaggaggcatccttgtcttgttcttcatcttagggggaaagcattcagcatttcacccttaaatttgatttaggctctggtattttcatagactttcattatcaggtggaagaagttaattgctattcctagtttactgagggatttttatcaagaacaggtgttgcattttttcaaatgctttttctgtgtttactgagatgatcatgtggtttttgtcctttatttatatggtgtattgttacattaattgatttttttgggtgttaaaccagccttgaattcctgagattaatcccacttggtcatgctgtgtaatcctttgtatatattgctggattcagtttgttagtattttattaattttgtgttcatatttacaagagatattgtctgcagttttcttatgatgtctttgcttggttttggtgttagtgtgatcctggcctcatgaattggaaacctttctctcatcttctagtttttttggaagaattggtattaacttttctttaaatgtctggtagaaatcaccagtgaagccatctgaatctgggcttctctttggttagtttttgattgttaaatctacctttttacttattgtaggttttttcagatattctgtttctttaatcagtgtctgtagtttatgtctttctacaaatgtgtccatttcatcaaagtttctagcttattggtatagtattttcttatttttattttataaggtcagtagtaatgtctcctctttcattcctaaatttagacatttgagccttcccttttttcttggtcactggcctagtctgttcaggcttgttatggattgtcatagtctgggtggcttataaacaacaggaatttatttctcatagttctggaggctgataagtcaagattgaggcactgttagatgttgtccctggtgagggctcctttcttagtttcttagtggagccttcttgctgtgtcctcacatggtggaaggagcaagggaaggatctcattcatgaggtctctgccacaagtgttctgaaatagcattccagaagtacaaggtgatacagttagtcaagagctataaattggtggataggaaaggcaaaaataagaagattgtattgagtttctagttatacaatgaactgaataactccttttcttttgagacaaattctcactctgtcgtccaggctggagtgcaatggcaccatcttggttcattgcaacctccgcctcacaggttcaagcattctcatgcctcagcctcccgagtagctaggattacaggtgcctgccaccatgcctggctaggatttgtattttagtagagttggggtttcaccatattggccaggctggtctcaaactactgacctcaggtgatccaccctcctcggcttcccaaagtgctgggattacaggcgtgagccactgcacctggccctgaataactctttagaaacagaaaaaatctctggtggttggttaaatagtaaatataaataaatctataaatttcctatatatcaataaggtagaaaatacaacaagaaatgtaacctcgtagaagcaatggaaatgataaaacactgtatgatgtgaatttaaaatgaaatttttaggacttacatgaggacttcttatttttgtatagggaaaccgatttttaaaaatgctcttttctgtacattttctattaaatcctaatataacaacataatggggggggattgacaaagagtaaatatgcaagaatagcctagataattctgaggaaaattgatggggagtagcctaacatattaaaatacattttaatacattgtaagtcagcaagaagacataggtctatggaatacatttgttagattttaggcagtgggatgatgtgggaggatttttgagttgttaaagagggtctcatgaatattatgtggatttagaagacaaggtaattctaggattgcttgcctctaatttactgagatttttaggtatctcagagaagataagaaatataaggaatgagaaatgtttaatggctttagtgactaggagtttctaaatggacacatgggcccatttcattagtttggtgaatagtgagagcaaagaatttgggaatttaagattgttgtacttctccaaatgaatgttttaagtataaagactagtatgtctttccacaaaaatggtaaaatatattgtcacatttatatcaaactgctaaaataagttttgatattttttaaaaaatgagatctcatcaggttaaatgaaaagagttgagaatcttcattcccaaagaggaaaatgattctgtatatcaacagaatcattcaacctttgactgtattctctatctacgttcctaaattgaacctatctatacatattttgttgctttgtctgtgtacagtcatgttggatttaaatgagaaatatctgattttaccacgttgaaacaagaacctaaaattagggaagtattcactgtgactcacatcttacccaggcagcctgctgttgaaaggatgatccctggtgcgcactgtagtctcagcctcaggattctataatgagattgagtggggtttcctgtgagcactctggggtgattgacagtaaggtgagggcagtcatcactttttatgcctacccttgatgatatgtccctgctgtctggggagggaccgaggacgaataggacttggtgatgtctaagtaattagtgtatgttggttccagctgaacaaactggagggtaatgatcaggtaaatggaaatggaacacattaatgcagactaaggtataaaagaccttagggttaaacttttcaacattttatgggattattagaatatctttatttcattttttatatttacatgtctctgtatatacatacacttatttatatttttgtcagtgtatcttcagttttaccttagatgtatatagagatgaaagcaacttaaatgtgaaaacctcaaacgcattttttctcctttacatgatttcagaatattttcaaactttttctgtttggaaaggagttaaggttcttaattaaacattttctttttaatttcacaaaaattgttaatggacttgtttggagctgatgcctatcactgatcctcaaataggagcaaatgactaaagtcaggcttggaaaacttttttggggtgttaactgaaaagtatcaggtgaccttttatttgtgtgtgtgtgtgtgtgtgtgtgtgtacttgagaatgttatatttcagtaacattttcttaaactgccttttcttagtaaaggatattttaagatgatggctgtcctggtccatgtttcacagttggtcttaattagatcagaaatatttccagacatttaggttgcaataggaaatctataggattcttaatttattcttacaaaaggtatttatagttgccattcttcaatattaactttccttatcaacagcaaaaagtcttacggcaaagcctctggagagtgactgcagtactgcatttaatgggaagggaggaattgtttgccttagtatatggttttgaatctgggagtctggtaattaggtaatcaaagggtttaaaaaatggcataatggctttaaaacttgctattgctcacttttcttataaaacttagctttcagaaatctttttagattaagaatacaatgtacctactatgcaaatttaaaacaatagacttttcattaaagaactaaccaggagaagaaagcatttaagatgtgtagacatttcttttccttttctttttttcttttattgtctttggaaaaacttattttgcagaaacagtatactgtatcaattttaagtgttttgattatctttgacttggctaaattattttctctgcatttttgggtaaaatggaataggatgggattcctggtaggtatttgttcacattaatactatatttaattggagatcctgcagaatagtagcaggaggctgaagagaattatttagcattagcaatggctcgtctgggagttgtggactaatcaaggcgctgtagtgttagtggtggggatgatgggaattatgacgattatgacatgtaagcatgtctgtgtacgaattggacaggcaatgagttaatcaagaagtatgttaaatggctcccatgctgattcattattatctaccatagtgcctgtcaggttgtgtatttaaaaaacacaatcattgccaaattcaatatgtatatgagctgaattcagccattgtttgcttttccataaaataacctcagatttccttatatgtataaaaatagaaaattgtgtcaactgtgctgtgatttgtgtttatagtatggtatcttttttttttaacagagtcatttaaacctatgtttgctttgccctttcatatattcgtgtaaatattctctggcttgttttctatgcataaagggtttgggtttgaaagtgaaatttatgtgtctttacttttcaagatgaaaaaataattccagtatttcagagacaaattaatatttaacacatgaactatggacaaatcaaagcatgaatcttttccaccatcaaaatgcttgaatttaaattgggggtgggggtggaaacctcctttgctgtagcggggggtctctttgtgccaggtagacagacccattctgtgcccagcatggttggggttatctgtcaggaaactatctattagaaatgctagaaatgtatgtattttgggggaatggaactaataaattgaattccttttagaaaataaattgaaatgcagcataaatccatgagcaaactggattatatctctaggcaaatttaaagagttattgtacagatgaacaccatttttttttattattgtgagcactgccaaatttaataaaactttctaccaaactgtgactttcatgtattaacttaattaaagcagtgttatgggtaatactcagtgttaacctgtggatggctgttattgaaatccattatcaatggagtcagtattagtggtcagcagcatcagaagtaaaacttgcaaccaagaccctcccatgggtgctgtgagctcagcaggttaaattgtcaaaaaccagtaaagcttcttaaaggactgatagcttaagccacccggagttaaaggtaaactagtcattccagtcaagatggactatgactttatttagcagtcaggcaaaaattatatttgggcaggatttatatcagtatcttcatgtatgacttattcatttgtatgttcatgtaccttgctatttaaattcaataaaaccatccagctttttttaatctgtgggaagtgacttgtggatattttcttttataaaacgttaaggagatgtcttaagactttctgaattttttgttaataacttatactgaagttactttttacttatactaaaattttaaattaagaaaaaagtgaaatattgtattaatatatctttttggttttgtttattttataatttctggtaaacttaaacaacatggttttaaagggaatttatgtatttcagtgtaattagtacctgctgttatgaaaaagcacctaatcatggatttatttttctctaagcagctatttgggaaggatcagaagtcctatcttactgaaaaagcatacatataataaaagatttgagggccgggcgtggtggctcacgcccgtaatcccagcactttgggaggccgaggcaggcggatcatgaggtcaggagatcgagaccatcctggctaacacagtgaaaccccgtctctactaaaaatacaaaaagttagccgggcgtggtggtgggtgcgtgtagtcccagcttctcgggaggctgaggcaggagaatggcgtgaacctgagaagcagagcttgcactgagccgagatcgcgccactgcacttcagcctgggcgacagagctagactccgtctcaaaaaacaaaaaacaaaaaaaaagatttgatatacagtttaccttattctatgttccagtgtttctaaggccatgacttaactcatttttacagcctccctcattcagactccttagtggagggaaaggacatgattattccaaataatgcctctcactcattcagaatctatggtgtactggaaaagcacataattacataaggattgaattactgttactgttttaaattgagaaaattggggcttcaagtataaagccaatcttcgggttgccaaagatcactgggctagtaagtagtggagctgagattcaaattatgtgtaacttctaagttgtactgtttccactgtgcatgttgcttctcatactaagtatgaggaaaagtcccctcccaccacaaaacgaagtgaagtttattactttgaaggcagagtttttattagtgcctgttggaggctgggtactatgataggtactggaactagaagagtgactggaagtgataggattgctgctttagagatgggtatagagaaataaaacataaataattacaaattgtgataagtgttatgagggaaacaagttgttgagagagaatcatggttcccttcagtaatagggtgctcagggaaagtcttgctgaggggtaaaatgtaagctgagaatgatggatgagaaggagtcagccagctaggcagacaagaccgcgtgcgcaaaggctctgagtcaccccagtctgcttctgtcctcagtactctactatagagttcttgctagtgtgaccaccagttttctcatgttaagtccagtggacatttttcagtcctcttctgtttgacttcccagaatcttttaacactattaccctttttcagacactctcatcctctggctttggtgccattttaatctcctagttttctctctacttctgtggccctcctctgtgtcccctctacaggaatcactcaaggtttgattggtgggctcttcttaaaattgttttattttttgtactttctctacccttaccctgaaagatggcattctcttccacttctgtttctgtggttttaatcaaccctagactccaactctgttttctctctctctgtgacgtctctagttgaatgttttaccactacctcaaacccagcattacccaaactgaactttgatccttcgggcttcttgtatctgaatcctcctgcagaagcacaagatgtaggaatttatgttcaccatcattctttctttcatttctcatttccaatttatgagcaagtccttttcataaataattttggaatctagtcacctatcttcacttcgttattgcttctttagcaaggtcttttaaaatcttctagtgaatcttttaatcttttagactgataaaattaatttcatctggggcagtttatctaatgtgaactgtttcagtttctgaagttttgtttgatagcgaatgctttcttactctgttttggaattttagttcataggctcttttttctggtgaaagttaaaaatgtttattgctcttcatgcttcatcttctcccttccctttgcttccttgaccttcctcttcctctctctttcctagtttctctctcaccccggccattgctgcctcccaccttctccctgaccagtagttttgtgggtgcccccccgccggcattttggattcctaatctacatccaggtcttatggtgatagtttggacacatggcagattagtcccagcagcttgttcagattttgaccctgaagctgtggttctgcctccctaggtccacagtctccaggagttgtagtgagctgtagttgcagacaatacttggtggcctcctcttcaggccaagggcagttcctctttggcctggtcttcaccagtggctctggctctcttctcagtcttgtgagaacattctcgccatctgtactttgcatttggcacttcctgcttctgaggaaccagccagtggttagcattgttatgcgtttttctcctgttttgagtttgtgaaatgtttaccatttatttctgcttacctgttttcttagttttcctttctgggttttattgtcattgttgtacatttgaagtagagagagcttttgaaatatgaactcactgtgccatcctttttttgtgctaaatttattgaagtccacaaaaaccagagaaaaatgtcagatctcaaaattgtgtttttgctcaatttcaagcatcaatttatccaagttacccacttgatacctgacttgccctacttagcaagtcgaggcattgttttgctggctctggcactctggctatagccagtcactcaccccacttgggattgcttcctttgctgcttgttcctgctgctgctcagtggcagctgccaagttggagtagcaaagggaaaagtttagtaggcatcttttaggaagacagaatgctgtctggagatggcagtggtggatttatatctgagtcattcatctgaattggaacctgtacaaaggaaaagaggttctagctcagataaatagatataaattcattgttgctatcttcaggcattcatttatttaattagatgcactgaaaagcactctcgaggtgtggggacagggtgtggtgtatccaatggagagtttgtagaaattgttaagttgaggtacaactgcttataaatagtatttgaaaatgtcttattttgtaaacaactgagtatttagttgattgcaaatcttcctgtaaatcaatgatagattagtttagtttccgggtctatagtatattcctcaaatggatagtaggtatttttgtaaaggggactttataattaaatatagcaaagtgtcttccgtggactgtattaattaaatgttacagatccccaggctgcactgatgaaactcagctgggatgctctacatgtgatagggaaatttggtttcaaaattacacaacctatttgtgaaggtttcgtgtaatttttcttttcagtaagaagtgtttccatgtatcagtttttttacatttaaaaaagtaatttattttcaattgtggtaaagtatacataacataaaagtttaccattttaaccatttgttatcaaaagatgatgagatctgtggaggaaaaaatggagagctttattttctatagaaaaaacttgcagactggggaggcatagttttcactagtgaaaatgttgctctaaagagaaaaaaaaaggggcttggcttaagtagggaaagttcttgccctcattctctgtgaggtctgtgcaaacgaaggattcaagcttgttcggttcagattgaaccctaatctggtgccagaagtgtctctgtcagatgttccttcgaaaggctggtgcaggggaggtttctgctgcaattcttcttggccccagtcacaggaactgttctggcttaagaacagttcttaatcaagagccgtgatttccaagaacgaagggtggtgaccactcttctctcactctgctatggccgcttggacccattgtctaaatgtgggtatattagccacagggagtgcatctcatctggagagcttgcagttttatttacaattttatttcacacatttttaagcatacagttcagtaacattaagcacattcacattgttttgcaggatgaaaagttctggaaacgggtggtggcgatggtttcgcattatcaatttttacctagtatgcttttttttatacagtgttttaaagtgttggaaaaaacttatgcctttacagtattttattatattagcttatgttcattgtatggggttgtaggcagtgacagatactcaacctttaacaaataccgttgagcacttgttatgtgaagatgctccacatcttttgaactaggcagttgtggttcctgcactcttgtggcttccagttcagtggaagaagcagacattttataattacatacatttatgacattagtgtaatgaaaaattatagggtgttttgtaagtgtggaacaggaggatctgaaccagcctggggagtcagggaatgcttttttgaggaattcacattttggcagagacctgaagggggtgacaagagttaggtgaagctgggagaggacaatactagggcagaatagagcttggtaatttccagaaagttagatagggctaatgtactcttaaacaggaggcctgcagtgttgttcacaatgttcacctatatgtagttgtgtttgttttttaaatttttaaaaattatcctatagtaataggatacccatctttcatacccttctgtggatatcagcacatgtgtagattatgtcactactagcacaatcagaatgcagagtagttccattacccctcagactcccttgtgagtcattacccctcagactcccttgtgtatcccattagtgtcacatccttttccaccctgacactggcaaccacggatgtgtttcccatcactatagcattgtcatttccacacagcgtgtaaccttttgagactggctactttcactcagaatatgtttttgtgattcatccaaactgttgtgtgtatcaatagaatgttccttttttattaccgagtagtgttgcattgtgtggatgcacaggtttttttaaatccatttacctgttgaaggacatttgggttgtttccagcttttgacaattatgaatagaactgttgtaaacatttgtgtacagattctgtttctctagtataaatatctaggagtgggattgctggtcatatggtaagtataagaaactgctagacttttccagagttgctataccagaatacaatgagagttgtagtggttcttcatccacttcagcagtcttgtcagtatttttttttttgagacagagtctcactctgtcaccggggctagagtgtagtggcaccatcttggctcactgcaacctccacctcccgggttcaagcgattctcctgcctcagcgtcctgagtagctgtagctggcattacaggcacctgtcactatgcccagctaactttttgtatttttactagagacggggtttcaccatgttggccaggctggtcttgaactcctgacctcgtgattcacctgcctcagcctcccaaactgctaggattatagacatgagccaccatgcccggcctcattttaaccactctaatatggtttggaagtagtatctcattgtggttttaatttgcatttgcctaatggttaatgatgatgaccttcttctcatgtgcttatttgccatccatgtatccttttcagtgaataagctttgcctgttttttaattcatttgtttgtttgtttttctgttgttgagtttagagtgttctttatgtattccgaatacaggtcctttgttggatgtatgattggcaaatagtttcttccagttggtaggttgtcttttttgtcctcttgacagtgtctactgcagatcacttgtttttaattttgataaagtcagctgatcacttttttcatctataggttgtgttttactgtcatgtctaagaactctttacctaacttcaggccacgaagattttcttcaagatttttgtagttttgccctttattgttagatatgtgatccatcttgagttaattctctgtaagatttgcagtcggtttttttgttttttgtttttttgcatatagatgttgaattatttcaacaccattcattgaaaatagtatttctctattgtgatggttaatattgagtgtcaacttgattgggttgaaggatgcaaagtattgtgtgtctgcaagggtgttaccaaaggaggttgacatttgagtcagtggactgagagaggcagacccacccccaatctgggtgggcaccctctaatcagctgccagcgtggctagaatgaagcaggcagaagagtgtggaaggacttgacttgctgagtcttccggccttcatctttctcttgtgctgcatgcttcctgacctcgaacatcagactccaagttcttcagcctttggactcttggacttaactggtttgccaggggctctgaggccttcagccacagactgaaggctgtactgtcggctttcctacttttgaggttttgggactcagactggcttccctgctcttagcttgcagatggcctgttgtggtacttcaccttgtgatcatgcgagtcaatactctttaataaactccccttcatatgtacatccatactgttagttctgtccctttagagaaccctgactaatacaattacttttgcacctctgtcaaaaatcaaatggggtgatatttggatgggtttcttgactctgttctttttcattcatctgtgtctattcccttgtcagtactacatagtgttaaaattggattcctctacctttctttttctccccccatttttccaaaactgcttcagctattctggttcatttgccttttcgtatacattttagaatcagcttatgtttatgtacacacacaaaaaaaatcctgctgagattttgattagaattttgttgaatctacatcagtttgggaagaattgacattttccactgtgttgagtcttccaatccatgaacatggcatgtctcttaatttatttaggttttctttgttggtggtggtattcttagacagggtcttgctctgttgcccaggctggagtgcagttgtgtgatcatagctcactgtaggcttgaccacctgggctcaaacctcccacctcagcctcctgagtagctgggattacaggcttgtgccaccatgcccagctaggtttttaatttttttgtagagacagggtctccctatattgtcaaggctggtcctgaactcctgtgctcaagcagttctcttgctttgggattacaggtgtgagccaccatgcctagcctgtttaggtctgctttgatttctttcattagcatttcatagttttcaatatgcagatcctgcacatgctttgttttgtttgttttttgtagacagggtcttactgtgttgcccaggctggcctcaaactcctgggctcaagtgatcctcccaccacagcctcccaaatagctcccaactgtaggtacatgccaccatgcccagcttgtactgttttgttagatttttaacctaagtgtaatttttttttggagactcttaaaattgtattgtttggccaggcgtggtggctcgcatctgtaatcctagcactttgggaggctgaggtgggaggatcattgagccaggagtttgagaccagcctgggcaacatagccagaccctgtctctacaaacaaacaaaaatatagtagggtgtaggggcacatacctgtagtcctagctgctctggaggctgagagggagaattgcttgagcccaggagtttaaggctgcaatgagttatgatcacaacacttacattccagcctgggtgacagagtgagactctgtctctttaaaaaaattattgtttaggccggtgacagagtgagactccgttattgtttaaaaaattttggtttccagttgtacattgctagtagtagaagtatgattaatgtttgaatgttgaccttgcattctgtgatcttgctaaactcattagttctaggagtattttcgtaggttccttggggttgtctatgtagataatcatgttgtctgtgaacagagacagttcgatttttttttctttataatttgtatgtcttttattttatttttttctgttgctctagttaggaattccagtatgaagaggaagaggagtagcagtggtgcacattcttgccttattcccaatcttagtggaaaagtgttcagtcattcagaattaagtatggtattagctgtgggttttttgtggttgctttttatcaggttgaggaagatcctgtctactcctaatctgccaatgaatgttgaatgttgtcttacacttttcctaaatcaattgatatgatcatgtggggtttttttccttttgattgtaatatgctattttacgctgagcgattgatttttttagtatgaagctacttttgcattttggttgtggtgtattgttttttatatattgctggattggacttcttaattttttgttaaggattttttacatcattattatgagggacattggtctgcagttttctttttgtgtactgtctttggtattagcataatgttgtccttataaaattaattgggaaatgtttcttctctgaatgagagtgtataaaattgtttttttttttttttttttgagatggagtttcactcttgttgcccaggctggagtgcaatggtgtgatctcggctcactgcaacctccacctcccgggttcaagtgattctcctgcctcagcatctcaagtagctggggttacaggcgtgcaccaccacgcctggctaatttttgtatttttagtagaggtggggtttctccatgttggtcaggctggtctcaaactcccaacctcaggtgatccacctgtcttggcctcccaaagtgctgggattacaggtgtgagccacgcgcccggcctataaaattgttcagaattctccagtgaaaccatctgggcctggagatttcttcttcagaaggttttaaatgacgtattcaagttctttaatagttattggagtattcaggttatctatcttattttgagtgtgttttgttagctttgtgttttgccatttttgaggaattggttcatttcatctaaattgtccaatttatgcacatagaattattcttagaaaccttttattatccttttaatatctgcatagtttgtagtgataacctctttcctttcttattttggatgtcgtttttttcttcttttcttagtctttttagagatttatcagttttattgatgctttagaataactagcttaggttgcattgatgtcttttttctctattttctcttttaaaaattattgatatctcctctgttgtgttcttccttctactttaggtttattttgcttttctttttctggtttgtaaggtaggagcttagattattgatttgagatatatcttcttatttaatactataattttctctctaagcactctaagtgcatctaatatttttttttatatattgtgttttcatttttgttaagaatgttttctgagacttccttttttgcacataggttatttaaaattgtttaatttccaagcatttggagatttttctactgtctttctgttatttatttctaatactaattctctttgttcagagatcatattttgtattattatagtttttttcagtgtgttaagttcattttctgatccaggtatgacctgttttgttgcatgtttcatgtgcacttgtaaagattgtgtcttctgttgttagacttcagtactgtataaatgtcagtgagatacaactggtttgtggtattgtccagttcctctatatccatgccaattttctactacttgtctttcttttgagagtcttgatgtttccaacgatgactgggttattgtctgtttctcctctcagttctgccagtttttgctttatgaagcactgttgttaggaacatacacattaaggattattgtatctttttggtgaattgaccctgttactattaggtaatgttcttctctatcccttgtaaatttctttgctctgaagcctactttttctgatactaacctaggcattccagcctttatttgcttgatgtttgcatcgtattttttcccatcattttacctttaaactacatatgtcattatatttgatgtgactctcttgtacacagcatatacttgggtcatattttgacaatctcttttaatttgtatgtttaagtcttttttttttttttatttttttcgagacagggtctcactctgtcatccaggctggagtgcagtggcgcgattatggcccactgcagcctcagcctcctgggcccaagtgatcctttcacctcagcctcctgagtaactgggaacacctctagctaattttctttcgtggagtcgtggtctccctatgttgtccaggctggtcttgaactcctggactcaagcattcctctcatttcagcctcccaaagtgttgggattaaggcatgaaccaccacacctggccacttttatgtttaatgtagttattgaaatgtttggcttttgggctactgttttattattttgtttttctatctagtttttttcactgtttcactctttgtgtcttcttttgcattatttgaactttttaaaagtattcctttgaaatttattgtgtttatgactatctcgtgtagtttttcttcaaattaatactttattgattataatatacatacttaacttcctatggtctattgaaaattcatattttaccaccttaattggaatatgtcagtcttaccatcatgcaggtatctacattctcttcttatgttatggttttcttacgtgttatatctgcatgcattgaaaaccccatcagacaatgttaaaatttttgctttcaacagttaaacgtatttcaaaagcaatgttatcatttctgttgctcttccttcattccttatgttccagatttccttctaatgttattttccttctgtctgaagaacttccttaagcagttttagagctgatctgctagcaactaatgctcttagttttcctttatttgaaaatgtcttggctgggtgcaatagctcacgcctgtaatcacagcactttgggaggccgaagcgggtggatcacgaggtcaggagttcaagaccagcctggccaagatggtgaaactctgtctctaccaaaactacaaaaaaattagccaggcgcagtggtaggcgtctgtaatcccagctacttgggaggctgaggcaggagaaaggcttgaaccaggacagtagaggttgcagtgagccaagatcacaccactgcactccagcctgggagacagagcaaaactccatctcaaaaaaaaaaaaaaaaaaaaaaagaaagaaagaaaatgtctttatttcgccttcattcttagaggatatttgcactgaatatagagtactgagttgacagttctttctttccagcacttgaaaaacattatgtcacttccttctggtctttgtggcttctgatgtgaaatccatagtagtttgagtatcattcctttatagttaatgtgttgtttttctttgtttactttcaggaattttgtctttaattttcagtggtttgattatgttttctgatttctttttgttaccctgtttgagattcactgaccttcttgaatatgtaggtttatgtcttttaccaaacttgggaagttttcagtccttattaaaaaaaatattttctcagcatggtgctgagaacattttttttcttcttttctctgatagacatgtatgttagacctttaagtattgttccatagtctcttgttaattttttctactctttttttctctcttgtttcagattgtataatttctgttgatcagtcttcagatttattgactctttcctttgtcatctgtagtctacccttgagcccatccagtatgttttttttaatttgattattgcatattttagtttaaaattttccattggtttctttttacaaattctgtttcttttctgatactttcaaagtttccatttgtttcaagagtgttcataattgcttgttggaaaactttaataataacttccttaaaatctttgtgagataatttcaacatttttgttactttggtcttggtatttgatttttccttccctgtaagagatttacttggttcttgggttaattttagatattttgagtatgatgttatgagacataatcctctgaatttagttcatttctttttaggatgttaatatttttgtttcagtagcaattaacttggttggcttcagagtgcacattccagtttttttttgtttttttttttcctgtgggcggtgggtctttgtactcctatacagatccaccccacatatgtgtcaacaactcatcagtctgggatctgtggttagttcagtgtttaaattctttggtatacttattagaattacatccatacatgcccaacctagggatgagctcagaagttcataaacaactttattgtgtcacttctccatgctagcttctcccattctggttctttaggccttcacttttcagtcttcttacttagaaatctgaggttttattaccttgctctgctgttcaaattttgtgtttgtgtccaggacgtgtaaagagcacagagagagcagaaaaaaccttggggttttacctgccctcttgagactgcagtttcactgattgaagaagaatgtttcttctctcattgttttggctcttgctggcatctatgtctgcctctggtaccacagccacaaaattacttgggggttggggcaaaaaagaatagagcaaaaggaaaaaaaatatgggaattgagatttccataatgttgtaagtatcaggagctccctttcctgccttttgagtgagatgaataggggttctcctggagttctctccatcagtgtccccatgcctactttgcatttcaggcttttccaaggtcggtcagggagatcatgggaggaaaagaaaatgataaaactcaccacttgtttatagtaatttgaattcttttcttccttgatctgcctgctactgtttgcttttccaagtctataaatacttgattcgtgcattcttttgaggtttcatagttgaattcagtgggatagttggggtggagcatgcttagtccatcttacctgcagttagaatggccaggggtgtttcttgaaagctacttagaaaacaaatgtgggaaggaattagcagaatgcatctttgcatcctgtatactatgttgtgtatcctatattatggtaaaagtttggttagataacagaggaaaataaaggaggttttcattgttgatagcactatgtcctaaccttcatctgaggttactgggagagaaaggaaagtgttacagctaattgcttgaatgactcaactgcagtaatatatagtaagctgctattaatgatgcagtatagcttgcctcctgtggatgttattttctttccataggagataaacattgagaatcacagacttcccaaaatccaaacactttaccgtgacattcaagatccattcaagttcctactgatttttcttctaccatcctttcccatcagtcccttttcatacactttattttcaagccatctcacagatttctatactggcacctttcacatttccaccatttcgaatgtactctttctctgttagttctctctcactttttttcatttattagaaatccagttttattgttcaatagccaattctctgtgaaaccatttgtacatgttattttttattacatttatttatttatgtatttatttatttatcagacagagtctcactctgtctcccaggctggagtgcagtggcgtgatctcggctcactgcaacctccacctcccaggttcaagtgattattatgcctcagcctcccgagtagctgggattacaggcatgcaccaccatgtccagctgatttttttgtatttttaatagagacagtgtttcaccatgttggccaggctggtttcaaactactgacctcaagtgatctgcccgccttggcctcccaaagtgctaagtttacaggcgtgaaccaccacacccagcctttattactcttaattgcagttggtgtataagtctttcataccagaccaaactcctggaggggtagaggactgtgatttatcatctttttataccttgctgtaataaagtatacctgtaataaatttttgagtggatcagggaaaagaaaggaagtgttcatgatttagttaatgttaaagggatatgatgggtggaacatcaaatagttgaattacataagagagtggaaaacaaaggcaagtactgtttaaatggaattaggaactaatgttttgggaaatatgtttcgatgactttgagtgttggcaataatacttggaaattcattttttctgatctttttattatatacagtttttcttccagtagggcagattttttttttctctagtcttttctcttctgagggccagctgccacctcctataaggtagagtttttctaccttgtgctgtccagatgtttctttttatttgaatttatttatttactcttttacacaaaagaggcatgccaacagctgcactaagtgttctttcctaagccagccagatgtttggacttggagaaaagttagattttgaaataaaagacaggtggattatagcccttcattcaaccattcagtttttccttgcctattgctgctgccaggtagggtgtctttaacccgtctttatagtacctcttgtcacaaatttagttccagaaattaaaggactaactcctcctgaaatctctatgagatgaaatgagccttctttttttttttttttttgagatggagtcttgctctgtctcccaggctggcgtgcagtggcatgatctcggctcatgcaacctccgcctcctgggttcaagtgattctcctacctcagcctcccgagtagttaggattacaagtgcgtgccacgacatccagctaatttttatatttttagtagagatggggttttgccatgttggccaggctggtctcaaactgctgacctcaggtgatccacccgcctcggcctcccaaagtgctgggattacaggcatgagccaccacacccagctgaaatgaaccttcttacagactagattctatgtggttgtcctagtatgaggctggtaagcttgctgacatcatgcttgggttttcatctgatgaggttcagctggtggcccagcatagcgtatcaggctccctgtgtatgacagtgccgctggagatgggtcattcttcgactagtaggtgatttgatctcccctgatacatttatgttttttcacattttgggctctgattctcccccttacatgggcttcaattccaaggaaggtaggagttgagatacaggtacccttctgtttttcaatcctgctactcttgctgtgtttatctgagtgtggttctcttatactctgtaaactaagtccctaaagaggaacttctgttcctggtagctggacctacttaaggagttgcaggtaaattcagtgaatggcatagtcactttgggtctttaactattgagttaaaatatctttggccaggtgcggtggctcatgcctgtaatcccagcattttgggatgctgaggtgggtggatcatttgagggtcaggagtttgagactagcctgaccaacatggtgaaaccccgtctctactaaaaatacaaaaaaaaattagctagctgtggtggtgcacgcctgtagtcccagctacttgggaggctgaggcatgagaattgtttgcacgtgggaggcagagattgcagtgagctgagattgcgccactgtactccagcctgggtgacagagcgagactctgcatccacaaaaaaaaaaaaataaaaaaaaaaaataaaaatctttattaattattagtcttggatgaataggaagaaataaaaattgtttcttgagctccttcaaagtacttattctgtcttcgggtatagaatgattttcttttttgggaaatggggagaaagaatatttatttttgaagagaaaataaaacacttctagacatttttgttttctttttgttgttgttgtttgtttggttttgagtcagggtcttgctctgtcacccaggctaaagtgtagtggcacgaccatagctcactgcaacttccaactcatgggctcatgcaatcattctgcctcagcctcccaagcagctgggattacaggtgccagccaccatgtctggctaattaagagaaatttttttttttttttgtagagatggggcctctgtgttgcccaagctggtctggaactcctgggctcaaatgatcctcccatcttggcctccgaaagtgttgggtttacaggcatgagccaccatgcccggccccagatatttctgatgtctttaaatttcataccactgcttggtgaaaaatgactgtgctaaggaaaacttcttgagctccgtaactgcttttcatgattaccttcaatgtctgggagctaactataccaggaagcttttgagtggttgattttgctgctatttgtaatactcatctgatagtttttggtaagaaactaaacagccatataccgtaaatcaagagctgtcctgtcttttgggatcccagcaaaaatattggataatgtgggaaatggaatctgagcccagaaagccagcttttagagtttctaggaatgccatgatgtctgcatagatactaggagaaagatactcaccattaagatacataaatagaggaatggctgtagtaatttaggactggtatgatcactttcatgtactcatttttatatcatattagatgctcactagattagttgatgcttttcatgacagtcttaaaaataagttttaactgattaattgtagaaaactatgttcttgtttataatctttgatttttaaattaaaaatacatacactatatatttcctatgttaagaaatgaaaaaatttaaaagtcctgacttataattaaggctgttgggatgagccagacttcatcttcctgtcccaaattcccagggatgagaaaaagttgaagagaaaagacctaaagataaacaacaaaccagaattttgatggaaaatggtaaagagtactcatgggatcctggaaatgctggtcctggaaacagtgaggaattttgcaagagagatggctgatgggatcatgccccaggaaaccccagtctgaaacacagataggagaggatggctgcaaagatgggagcagctccagaggagacagccttgagcacaagaagtgacatccagctaggtgattcttccacactcagtgtccatgagggagcagatgattcgtaaacaggtagagccatatcttggaattctttagtagttaaaaagactgaggtggatctctgtatatcaacagagaacatctctaagacattaaaaatggaaagagaacttgtgtaaggacacatatggtataatgataccattaatggtaaaagaatcccaacctaaaatatctttatagttacctatgtaaaagcatacagcataggttctcaacagtggcattgttcacattatgggttagaggactctgtcatgggcgactgtcctgcacactagagggtttttagcagcatccctggcgtcttaccctctagatactagtcgtgtcccctcaggccccagtagtgacagccaaaactatctacagacattgccaactgtgtcctgggggacaaaattgctccaagttgggatcccttggcatatattgaagtctaataatgcatattcacctgttaagtgattaccggagagagacattgtaatggggacaggtgtggtcagtggagttgttagctttattttgaataagaatgtttaggtataacggtagggcgcagtggctcacgcctgtaatcccagcactttggaaggccaaggcaggcagatcatgaggttaggagatggagaccatcctggctaagatggtgaaacccatctctactaaaaatacaaaaaaatagctgggcatggtgacatacacctgtagtccctgcgactcaggaggctgaggcaggagaatcgcttgaacccaggaggtggaggttgcggtgagccaagattgcaccattgcactccagcctgggcgacagagtgagactccgtctcaaaaaaaaaaaaaaagtttagctattacatatatttacatatattacatgtaattaaaaacaaaacaaaagatagttttgcttttttttttttgagacagagtctcactctatcgcccaggctggagtgcgctggtgcaatctcggcagctcgctgcaatctctgcctcctgggttcaagtgattcttgtgcctcagtctcccaagcagctgggaccatagatatgcgccaccacactcggctaattttttgtatttttagcagagatggggttttgccatgctggccaggctgatctcaaactcctggcctcaagcgatctgcctgcctccacctcccaaagtgctgggattacaggcgtgagccaccgcaccggccagctttgcttttttataagatatctgttgtattaaatttaaaaatggttaatggtggctgggcgcggtggctcatgcctgtaatcccagcactttgggaggccgaggcagacggatcacggggtcaggagtttgagaccagcctgaccaacatggtgaaaccccgtctccactaaaactacaaaaattagccaggtgttgtggcacatgcctgtaatcccagctactcaggaggctgaggcaggagaatcacttgaacccaagaggcggaggttgcagtgagccaagatcgtgccactgcactccagcctaggcaacagagtgagactctgtctcaaaaaaaaaaaaaaatggttaatagttagaagaaatacaggtagcttacaaacgtgcaaatgtgcccaaactcactaataaccaggaaaatgcgaattaaaaaaatgaatcatttttctccattacattaataaaattagaaagataaatcatgttcagtgatggtgtagtgttgggaaattaatctctaatagtagtgtaagttgacctaagattttaaatgtgtagtttgtggtatttgtatttaaattaaatatttttcttatagaaatatacatatgtatgcagattggcatgtttagggaagcttattgcagcgcacaatacctgcaaattggaaccatgtccaatactaggagaatggttaaataagttatggttcatctagattactagaaatactgggtagcagttaaaaattatgaggtagaattctaaaaaaaaaaaaaactgagtgataaaattagttgtagaataaaatgtagtgtgattcagtttataccaagaaaaatcttaaacatgaaataaaactctgcacctttatttctgcatatccatatgaaaatgcttaggtaagtttggaaggacacatgcaaaactgatcatggctggataacaggaaatgggactaggagcctttaaaacggggcagggaataatggttatctggtatctatactgcttaagctttttttctttttaaccaaaggagtaactcatacattacttgggtaattacaataaaattgaaaaatgtaagaacatctaaatgacttgctttatatgcatagtgtcatcatttagtggcctgtgttgagcagtgatagctgctgctggggctctggtagggctttaagatcccatgacttttggtggctctccatattttgtggaattggcattagctgttcatatggtttggaaacacttttttaaaaatattgatttcagtggagattatttcccaaccctattcctagaatttcactctgttattgcttcagaaagatgtattcagaaatatatgcctgtgtatttatgacttcatcactagactttgaatgcatgtgtgatagctttctctttagtaagtggaaattaatcttaaagattgcaagctagagctgagcccacactcttactggtattttcttgtttcctcccctaacctaacttgtcatagtttttcttaggtagtattatttatttctttttttactacgtagtgacattcttcaaatgtatactttcactctggcttgtccgtaattggctggaaattgtgatggatctatatagttttttttgtgtttttaataaaatctgtataacataaagtttactattttgctcattttatttcatttatttaattattattttatatttttacagatggggtcacactgtgttgcccaggttggactcgaactcctgggcttgagtgatcctcctgcctcagcctcctaagccgtggggactacaggaactgggccactgcacacggcagttttagtctttttattttttattttttgagacagggtctcactctgttagccaggatggagtgcagtggtggaatcacagctcactgccaccttagcctccacttgggaagcctcttgggtctgccactgcttgtcagaaactttttactctgaattatgtcatatctcaggtgtttttacctagttattttgcacattacccttctcaaaggcatttgttcaagtttttcctaagctaatgaaggaaaacaaacctgagtcatctcttggctgtcactctgcctctcctactctttacatccagccatatgtacagtcctcaccccacccaccccacccctactctactttttcctctgctttattccgcagtcctttcatttgtggtctggtacccaccagctacactgacatgactcttgctaaggttttgcttgaatacttgatgtctcctttctctctgtcattcctccccttctcccttgatgcttctactaaggggtcagtggtatgagaagatagttctcctcctgctggttttcattattttgttgtttactgtatcgtcaggaatgcatgcttgcaagacaaagactaaaacaaaaaacaaaaaacccaaacagcaaaaaaaccccaaaacacctttgttttggttccgagatcgattcagtattagttcccttttgtgaaatgaaaacaggattgtagaaaatgggctgggaattttgcaactggcaaaaacgtattctctttttttcctgtagtttaaaattttaccactttgaaaatcatgtaagttatcttagaagaaaaatagtagtccactaattctaccatccaaaataaccatgaataaatatgtcttggtgctacacatgtagtttttcaaaatggaatcaaagcgaatctttaaaaaaaatcattttgttttctatgatcaaattgcctttctgggaaaggacatgccagaatgttagttttttaaaacttataaaagtatctttagatactttgaatgaaatagaaagagttctattctttttttttttagaaataggattttatctggttgtttgattttttttttttttttcagttattcaaatgaagattgatgcagttggctttcctttaaccttttagtctttcagggtaattttctttctttttttttttgagactcccaacaagtttattattttttaaattgtggtaaaatgcttataaggaaacttgccatcttaactatttttaagtgtacagttcagtggcattaagtacattcacattgttgtgcagccatcactataatctatctccagaactctcttcatattccaaactgaaactctgtacccatttaacagtaactccccattccaggctcgccacagtctctggcaaccactattctactttcaggataattttcattggttagtaatgtttggataatttgattagatttggtggatactgaagactggccgggttatgtaagctgttgctactttcagccaaggagtgcatctagtccgtattacatcatccttggagtgttctacccagtgtcttgcattgaaggacatcagaaggaaaactcctgtattctcagtcgtggtaaatagtgtccacttcattacagatctccttgagtgataggtttcaaaatatctctaggcatgaagaaacatttccaaacctgcttgtcttctctacctttctcagtatgtactagtttagaaggtattcaaaatgtttcactgagaccattgagttttatgctaaatataacatctggcctagcactttttatcactcatatgcaatctatttgataaggacagggaccaaatagaatgtctttttcaatgtattttaggcatctaattgactaatatgaaattttctattaatccagagtttttaaatgcaggcataattcccccccaccccgcccgcaaagattcagtcttgctctgttgcccaggctggagtgcagtggcctgatcggctcactgcaacctctgcctcccaggttcagcaattctcctgcctcagcctcccgagtagctgggattacaggcatgcaccattacgcccaggtaatttttcttttgtattttttggtagagacagggtttcaccatgttggtcaggctggtcttgaacccctgaccttgtgatccacccgcctcggcctcccaaagtgctgggattgcaggcgtgagctactgcacctggctgcaggcatactttttaacctatttatatccaaacatttaaatttattttttatttttattatttttaatatttttatcattgtatatgtttatttatattattatttcaaattgtttattaggtatgaattttacaaactttacttatattagcggtaacggtggagcgggagagtattgcgccttctccaagctccccggcgagaaccaccaatagtgtggtggaacttacggccgtttccaagggccagggctcttttggcctgcagatgtcagcccacacatctccctgtgctgtggactgatttggtgatccattaggtgtcaggatttcttctgatagctttatggaatggatcagtgaggataacctcaaaaaatttgtatgtggaatcttcaccaacccagtaagaattcaggactctcaaagccccacagtggcgtccagcttgctcctctgcaacggactgaaggcttggagcaaactttagctggttaacaccatgatggacaggcttgccataagttgcacccttaggaactgggcgttttcggccaccacggcaaacacgaatcctatatataacgtaaccttgcttggcctcgcagcccagtcagcgcgctttatcaggctgggtggggcggagagccctgtggagagcagagagctggcggtactgccagcagcggaccctcagaagaaagcgcatgacatcagactgctgctttctccgtagctcctggatgtactcgtatgcacccatcttggcttacctgatggctgctgccagacggaagaaaagaagtttaatttattttttaaaagttaataaagaagatgatttttctcagtcctgtaagatgaaaaacacatctgttgttctagttatttggaaattaggctcatacgggtaatagttgatgctagtaatttttctctgaagaataaaataattcaaaatagaaaactaaatgcttggctgggcgcggtggctcacacctgtaatcccagcactttgggaggctgaggtaggcggatcacctgaggtcgggagttcgagaccagcctgacccacatggagaaaccctatctctactaaaaatacaaagttagccggggttggtggcgcatgcctgtaatcccagctacttgggaaggctgaggcaggagaatcgcttgaacctgggaggtggaggttgcgatgagccgagatcgcgccattgcactccagcctgggcaagagcaaaaactctgtctcaaaaaaaaaaccaaacaaacagaaaacaaaacaaaacaaaaaaaaccctaaatgcttgatgggaaagctaataatctgctttaaaaatctctattggttttctgagaacggagaagtttatgaagacaaactatacttagtgttagtatttaaaatgctttacttttctttttgaaacatatagccagtaaatcctgcttagttgattagtgtacctcagtttaaactttccatggttgttatgtatttcctttgccattaaaatatataaaaaggaatttatatttttcaagatgttgaaatttttgaaacaaatatatctactcagcctatgcaatattaagtcattctgcagaatagcatctgcattgcttgaatattgtttgtttgttttgtattattaagccaaaaaaaacacctcacacatttcatacaacaatgacaacaaaattgaaatagagtttcaaaagtttgttagattgttctttccaggttgactcttaagtgtctctttaactaaggcagtagagaattcaaatgttttcttttgcatggccttttgctactagtgaccctgggctagactgtgggcttgttgagatgtgaatgtaccctgccccctgaagtaagatttgttcctgcaaatggaggaaaagaagccaaccaatcctttataaacaatttgtgtttagtccttctttgtaaagtccatagcagttttgacctgcttttaatgcatgatttattcaattgtttattggagcactcttttttttttttttttaaactggaacaatcttaatcacccagtaaaatatattaggctctgagctagttcttgataggtttattttatttatttatttatttttttgagacagagtctcactctgttgcccaggctggagtgcagtggcgcaatctcggctcactgcaagctccgcctcccgggttcacgccattctcctgcctcagcctcccgagtagctgggactacaggcgtccgccaccacgcctggctaattttttgtgtttttagtagaaacggggtttcaccatgttagccaggatggtctcggtctcctgacctcgtgatccgcccacctcagcctcccaaagtgctgggattacaggcatgagccaccgcgcccggcctagttcttggtatgtttataaaacgtttgtgataacataggaaaaatgtctattatgctagttaaaaaacaaaagggtgaaaattatatatgcggtatcattacgaaagtgtatttagagaaaagactaaaaatgtcaatactattaggattctctctctcctttttacttttgaatgcatgttcattatagaaattttggacacataaacacatgtgcctatgtgtatcttttaatttcttttccttgataaaccaccaattgccatatgtattgccaagattaagaagactttatgtaggtgtagatttttaccttaaacataatgaaaaaaaaataataaaagttgcaactttttgtacctcaaagacaatggcttttaacatttgataatgaaagttattaagcaagctgctatccaagtgtatctatgagtaaatagctttaatcacataacattgggctaggggagattaaaaaaagaatttaaggcgtaaccttatgatctggtggaggagaaattgtaactgtgcaaagcagttaaaatgagattgttgggtagatgagattatatgctaaaatctgcactaactactctcagagtttagattagaggagattcatcctaaattgaagtacttgggaaagatccagtggtagatgtgaaacttggagtccatcttctataataggtggtatctgaggacaataaaacaagtgtggatttaagtttaaacaaagacttaaatgtattctttttaaaggattgtgaagtactcaatttctttcttacagaagaaaactacaatcacaattacaacaacaaaattgacagtaacaggatctgaagtggacagagggcaatagggcaatagaggagggggcatcctggtctgagggcagaagagcaacttgaggttgggggcataccaggcaacgataaccacgaggaaggccttgctttgaacacagggatatttagaagccctttgcaagcagggctgcttttccctacaattggtattattaaataattaccgaatgtatatatttggatattttatagtaagatattgacctgaaaatcccttgggcatttacctgatcttttacctttcaatactcaatataattttttactaaagtggaaaatatttattgaattgacaaagagaattcttagctttctaaaagactacttttttagttttttaagatctcatttaaaacaaagtatttaaaaattatttcataactgaagactctaacagaaatactcaggtatttgccacctttgacttttttttttggtagaaggtgggtcataaatgtttaggtatatgtttgtgttccagtttttatatctgccttgcaaaataattgtaatctggaagtttctgaaactggaaagccattaggaaattaggaaaagtcatttaaaaagatagtaatcctttcatcagttaaaaagaatagactccttttagaactaagcagtttactctttttcatattgaatgcttagcttctattatgcaaaataaatagatttaaacattatagagtgagtagtcttaaaaatggagcatacattcctgaattttgagtagctttagaacttaatacacatatcatttcttttaggaataaatgtaaaatggatgaagattgaatgtgagagtatttaaatgattctcaagattttctggttcatgtgttgtgatattgaactctttctttcgtcttaggctttaatttgtgcctggtgctgacctgatgctgtgcagggacactcactgcatccctccattcagtccctctaattatcccaacttcctggggagcttgcttagaactgggcatgagtgctctttattaaaatattgggctaccctggctacatgtaacaaggtagtttttgatatcaaatttatgtattgatgaacggaataggaagctaaaattgtttgctgtgattttacataaagagataggggatattatggaaattatttggttagacaatgaattaggctgtaataaatgaaatcatggttaatagagttcctgagtttatttgttgcattgttgctttttagtgcatactcaaaaagaaatacgactctataaatgataggcagaacaatcagatttgcaattttgtgtgtatttgcagatgatggtaattctttttgctgggcgcatctgttaatgcagaaatttgtctcctcaggttcatgtgaaaatggcggatgaggctgtctgtgttggcccagctcccaccagtaaaagctacctcaacatggatgccatcatggaagccattaagaaaaccagggcccaagctgtgagtctgaatgaatctatctactgcagctgtttcatatgtagtgagcagaaagctagagtttgtatttaaaaaaaaaaataggaaagaatgattgaaaatgctgttgcagttagttcatgtcacatgagttaaatgtggtcgaattcgctactggaaatcaaaggctttgtagcatctggcagtgttggttgctgatcctgcaggtggctgctggattcagctttcacaccagggagcagtttcagttcatttccaaatttgctaggaaaaaagaaatcccaattagttttgagtattaaccctttccgtgtaataagagcattttaaaaaattctgtgttataaacaggatccaaagactgtgttcaaattccattttaataatttaaaaattacttatacctagtacacttccagaaataaaaacagcacatttggtaattattttagtttgttaatgtcagtagaatgctcataatttacaaggataaatcattctctccacccccagttctgtttgaatagagtggaatccaaggaaaaaaatgatttctgatatcagaaacagtgttttttcttctattttcttttttctttttttaattatcagaactaattatatatagtgttaaaaactatgcaaagttatctctaaaactggatggaaacatccaacaccagcaattaagcctggagcgcttcaattagcgctcacatttcttttgaaagaaatgttttagtaagatgaatgtttaaataaaaagcctaattcgtgaacccatattatagatgtttacagtttattagcacagttagtgaaggtaaaacactttaaccttttaactatagcttgccaaaataaatatgtagttgagtgttgataaaatgaagttggtggaatgaaaactcttcttctctgatacagtagtttaaattcttctgtaccatgctcataaagcttagttcagctttttttttgttttgttttttgagatggagtttcgctcttgttgcccaggccagagtgcgatggcgtgatcttggctcactgcaacctctgtcccgccaggttcaagcgattctcttgcctcagcctcccaagtagctgggattacaggtgcctgccaccatgcccagctaattttgtatttttagtagagaaggggtttcaccatgttggtcaggctggtcttgaactcctgacctcaggtgatctgcctgcctcagccttctaaactgctgggattacaggcaggagccactgtgcccagcccgagttcagcatttaaaagtcgctgatacgtagctatttctggattatgatactggttcctttagaaatttgactctctttttagcagaattattttactagaagtatgttcaacactggctgatactgaagtggcgaaatttatgtttggccagtctgggagagccaaaaattacttgattggatcaggctggtagattgtagcaatgtggcttgtgggtgaggatagtataaagtagttgtggatggcaaagtttggggtgaggaaggaaagaagagtagacattagaagaaaaaaaattcagagcacaaaataaaagtaaaaccacacctccattttagttcagtttgatagaaacggcttgttggtagttgccgagtattattaatgccatcaggaataaaatgtgttagctgtcctagtagtctgggttttggaaattaccagttcgtgagtactgtaaagaaaggagaatttagagtttttcatccatctttgccaaggttccttttacataattctttgatgcaccagccattgtgaaattctccagaattgtgggcaaagttagcctcaggaaaaggagagagagttttgttgaatagtgtagacaaatgccagtgggcaggaagctatgtgggcatatactccccattgtggttaggacaaaggtagtgtgtggaaaatgaatcagttaggacaaagggagtgtggagaaagtaaatataagaggcagtttcttggaatttgattctgatcctagaaatgtgagttagaactgatcagtgtataagagaagtgtacttattcaagggctcttgaacagtaaatattaatacataaatgcactgtacattttgcttataaagcttttgcaatatgataaaattgaaagtgctttttgctttcatttctaaggtacatccaggttatggattcctttcagaaaacaaagaatttgccagatgtttggtaagttggtaatgaaccagaaactgttcatttctttttcagaaagcagtgtggtagcatggctttgtaaatgtgggtagtgatggattatagaattttaattaacccagcagttctttgaaaattgtgacaagtgaagtggttttagtctgaaactcaactgtttatttgaagagtaattataaaaacagaaaagtttacaaaatcaccattacactgaatgaatgatacctggtttattatatactgcatgatatttgaattaaagttaaaaacttcagatttttaactgtaaatatgttagggagtttagtgagttattgtagtgatttaattattttgtggcatttaatatcaaatcttaccaatgcctctattttgggtgaagttgtttttaatgatctaaatgtccccttccagctaggtgaattaacgtatgtttgttattaaattgatttttccaggtatatttataacttcattcaagatggtactgaaaccttattttttaggtactagaatatgattttgattaatgtttgtacatatgtttgttattagatcaattatgccaggtactatcttaatttattctaatatgttatacttgtttctgtggcatacagtcatgtgttgcttaacagcgtgaatacattctgagaaatgcatcattaggcgagttcatccttgtgtgaacatcacagagtctacttacagaaatctacatggtagagtctcccacacacttaggctaagtgtgttatagcctattgctcctaggctacaaacctatacgtgttgctgtactggatcctgtaggctgttgtaatacagtggtagatatttgtgtatctaaacatgtaaacagggaagatacagttaaaaatacagtattagaatctatggaaccactgtcatacgtgtggtgcctcattgaaatattctgtggagcataactgtactcgtattctgttcttccacggattggaaattatttgtgaatgttgttattttctagatggaatttccacttaaaatctataactttaacttgaaacaattattaagatcacagaattgtctatttgaaccaccttgctttgtgggtccaaaactaaggcctaaagagatatcctgagggggcaaattacatggacacatccagaggttccagtttcccaggttttatgcagcatatctacatttttttgtttatatccctttttattttttatcttccttggaattttgaccaagattctgttattataaaaactatttgaatataatacttaaatttagatgtgtatgtgtgtatatatataatgtaatgtattacatttaagtccgtatagatgagaggtcggcacactacagtccacaggacaaatgcagcctgctgcctgtttttgtcaataaaattttattgaaacacagccatgctctttcatttatgcattgtctatgctgcttttgtcctgtgacagcagagttgagtagttgtgacagagaccatttggcctatcaagcctaaaatactttttctatggtcctttatacaaaaagtttgggaactcctgctataaatgaatatccaaatccaaattatatgagtaggataagtgatgtggtgccagtattatacatttattcctatacagttaatacatttatttattttatatattatatataatattatatacagtttatgcattttttcagttattaaaaaaatgctgcctttttttttttttttttttttttttttgagacatagccttgctctgtcacccaggctggaatgtagtggcatgatctcggctcactgcaacctctgtctcctgggttcaagctattctgcctcagcctcctgagtagctgggattacaggcacacaccaccacgcctggctaatttttgtatttttagtagagacggggtttcaccattttagtcaggctggtcttgaactcctgatgtcgtgatccgcccacctcagcttcccaaagtgctgggattacaggcgtgagccactgtgtctggccaaaaaatgcttctttaaagtctgtttaaggcctttgagaaggatatattaataaaaatgaatccaatctggttcccgcgcagaatgctgcagtccatgggtgctatgagtcctgggtgctcatagtcatgttacggaaaataagttgatacacaaataacttcacttcagggaagaaaatactgtgagataagatcaatatctttgtaaatgaaagtaagaaggatgatttccatctggggttctacattagagaaaaacctgtagaatatacaacctcctcctttctttcacacgagttttctttccaaacctatttccccatttcccttttatcagtgctgtgcctccacccagcctgactgtgcgctgctcccatgcgtggctggctctgccctcagtgctttcctcactctctctgggtgggtgtgcctggcctcccacccaccgtgtctaactgctgcctgcccttgaaggcacagttcatatgcagcctctgcggggaaagggttctagatccttctgttgagaagtaatttctttccttggactttttgtttcagtttgattggaatgtttttgtttttggaaaaatgatttgtgctttatctgatacattgtttttacttaatatccaggactaaaatgattttttgattttttttgcataactgctgtgtatttgctttagaaagtgtacaataggccaaattcccccaatgtaaaaacacaccaaactttacaagactgataattttttatgctgagtttacgcgaagtgggattggattttatacagtccctgctgtccatgacttgaaaaagatcatgtgggccgggcgcggtggctcatgcctgtaatccctgcactttgggaggctgaggtgggcagatcacttgaggtcaggaattcgagaccagcttggacaacatggcgaaaccccatctctactaaaaacataaaaattggccaggtatggtggcacgagcctttgatcccagctacgtgggtggctgaggcaggagaatcgtttgagcccgggaggtggaggttgcagtgagctgagatcacgctactgcactccagcctaggcaacagagcgagactctgtctaaaaaagaaaaaaaaaaaaagatcatgtctttttgttattgcttagatagttcatagaaaaaacaaagctacacataatcctcataaaaatagcaattttcaataattttaatgtgctgagctaacagattttatttccaagctgttttctattctgtattttccctgcaggcttcttttattatgagcattaaaggaccatccatgggagactatgaggattgttaggatgaggcaaagacatcttaacagagtttacaaagagctttgaaacgtgaaactaccttctctggaaaaatgggatgttggcttgaagatatttcttagtattctgtgttttctttctggtttttctatgttgttttaatcatattatcataccttgtcatttcaggtaacatagcataagttatagtaattagtttcaagagaaacatatgttagaatttgtgttttgtgtttggatcctatctgtgtacttgaaagatacacgtatatgtagatggatagtgagttccatcaggatgctcagcgttgaaagcataggagggaactgtgctgagcgtgtgaggtttggcgattgtgctcttttatcttctttctttcttgagtttttagcaagataagacatgtaactactgtaaaatgagaggtaatttttaaaatagccactgggttaaccaaaaaccttttaaatagctgtggcatccagtgtgggcaagggtcacatagttttgttcctggaagtgtaaattgtttcagacctcccccggcccccagaaatttgctagtatttatcaaaatttaaaacatctatatgttctttaatttaacagttccacccttaagaatctcacttacaaagatatacttgagaaaatgttcatggtaaggtgtttcataatagcaaaatttagaaagtgttcaaaagtaaaatgtggagaatggtggcttccctgcagggtcattggtcctcagttacaaggctgcagtccatgatgtgttatagtttaaagtgtgttgtaagcactttgtaactaatactaaaattctgaagttagcaagtttgccagtgactttgtttaacaatttttttgtttataaaataaagtggattaaaaatgatccatatgatactctactcattcatatttggactttttttttatttgagtaggaaaaaataggagagacttagaccttgcaagcccagggttgtttataactcttattttcactatatgggctataatctgcatagctcatggaaatacattatttttatatatcgcagcttaagaagggttgagaattgttactgtagtgtattttgtgtagacatcattttaatgacataaattttcttattaacattattatattttccattttggacacagacctttgattttagtatcttaaaatttttaatttttgagaatgtaaaatgctaagaaatttaagcacatgaaaacattgaaaattaggatttctttccatctttgaaccttcgaaacaagaccccaatttaagtctttagaggtcaccactgttaccttctggagcatgtgtgtctgtatgtgtgtgtgtgtgtgtgtgtgtgtgtgtgtctgtctgtctgcgtgtgctagaattttgctatcatttgttttgtaagatactcttagttgcttaagtaggacttactttttttatatgaaaagaagtggcatagaacttttcttatataagaaaacagtggtccctaggcttttaaaaataagtatggaatacctacctgcaggtaagttatttaatctttatgacaacttatgatgtattcttatttttattcttggttttatggaagagagaacaatctctgaaagtttaaataaatgccttgtccagtgtcacatagctggtaaatgagagagtatggatccgttgtttagtatatgttccagactgactctcagatgcattggaactgggctgggccgttagtggtatttgtttttgatcgatagctttagctggcatctgttcttgctgttggtggaggcttctctctttctgcttccttcccctcttccccattggtgtatcatcatagagatctaaaaagtagagttgtttcttttgtttttctcatcttgtaacttggatgccagtgaaggcaaatcctcacttggatttgctaacttactaagtaaggtaactgagtgagctttgctcagttaactgagtgccagagctacagcatagagatattgatgcctttaaccactcgttgatattcttaagtggaactaataaagtctccctggatttggaggagaaagttctgtgactcctttttccttttcataataattttataatatttttctagttgtgacttgtacatatgtgatgttcaaaagaattgataagaactaatgaatgcaacttcataaaacccttattatgacagaatatcttttgaaatgtttgagaacgtttcctttcctatatgttggcttaaggtcagcttttagaatatttgaagattttgaatgcgatgtggaatactaaatgctctaaagtgaatgcctgaaaaaggaaaactctccctttacagttagggagtcttttaaggatgtagataggtcagatacttttagggcttgtgggattttggggagtggtttcaataggaaaagtctgggatttgatgaggctgggatttttttccctttgcttgaggttaaaacagattgaagtgttacgttctagttttcctattacgctctctccttactgccctatgtatctattagctcattctggagtcagaatgacagctaaattctttctctgccacttagtagctgtgtgatcttggacaggttgtttaatgtcggcctctgaagattgtgttttattcttactatttgcatgatatgtatttctccatctgtgattttatgttgaaaatactgtgtgtttcttgtagccaggatgtagttgtgtcatgcttttgaaataattctgatggtctctatttttaaattgtagtgtttagactatgaagttttttcttctttagtttgccttagtgtattttcttaaatagcagctttattgagatttaattcatgtgtcatcaggctcaccctttaaaagtatacaattgagtgatttgtagtatagtcacagagttatgtaaccatcactgctatgcaatgtcagtaaaatccattaacatttaataaatgatcaaggtggttggatttatgtctagcattttattatttgttttctctcagtctcccctttttttccttctgttttccttttctgacttggattattttagtaatttttgaaattccattaaaatttatctattggatctatctatttttcagtgttttttctaggattgcaatatccatcctaacatttcatattctagttagagctaatatgataccatttcaagtaaaatgtagaaattttgcgatcatatagtccatcctccttctcttcccatcactatcctctatgttatagttgtcatatgtatttcatctgcatgtattataaattctatgtgaaaatgttataattttgttataaacatgttgaggtgagttaggacatttctttaaattgatctgtcaaatttaaaatatagagacaaatctctagattaaatattttatttgagaatcacagaattggaatttgagacatacacatggggtcttcagtatatccaaggaacaaagagaaggttgaaggttttattagatagaaaaaaaatgttactgattattttgaaagaaagttcattggtacttgaaaagctttgggagctggcaggctcggataggagagtggcagtggtagtttaaaaactagtcttagagtgatagcaggttgtttcagcagttactaggtaaagctggtcttagggttacagcaggctgtttcagcaactgggcctctggatagttcagttcttggagcctgtgctatgtgccctgagtgcttttttcccctgactccttgactcttatgtagttgggtatacaagaatgacccaattcatgtaatcaactttcacagatccaaatatcattcagttgaaattaagactcattttattttggtccatttaaaaaatgttgtcttttaaaattacatatgtatttttattgtggtaaagcagacataacataaaatttaccctttcaccaattttaagagtgtggctcagtggctttaattttattcacaatgttttgcaatcatcagctccagaactttataatcaccccaaactgaaactgtacatattaaacactaattccccatttcccacctactcctagcccctggtaaccttccttttactttctgtctctgtgagtttacctattctaggtacctcacataagtggaatcatataagatttgttcttttatgtctggcttatttcactcagcataatattttcaaggttcatccaagttccttcctctttaagactgaataatagtctactctgtggatataccatattttgtttcttcatcacctgttgatggacatttgggctgtttgtaccttttggctgttgtgaataatgctgctatgaacactggtgtataagtatctgtttgggtccctgcttttgcttctttttagtatatagctaggagaggaattgctgggtcctatggtaattctatgtttaactttttgaggttctgccctactgttttccatagtggctgtaccatttctcattcccattgttttattgtttttaataaccaccaaatcatgcctttccttaatgcaagctctgggtaattagttgactcattggatatttgtaatgtccgctttacataagtttaagaggtttaatttgacagtatcttcctaaccaatatgtttatgcttgttagtctagtgttactgccagagacctattgcacagacttgtgggagtattaatattttttcccctcacattttctttaatgaaaaatttaagaaatacagaaaagtttgaagaattgtactactacaaatgccagtagattctataattaacattttcttatttgtttttaacatatttattcatttgtgttttcctctactcatctatcaatctcattttcattttgcacgtcaacttaagttgtagataatagtacaattcactctcctgtacacttcagcatgcagtttttaaagcagagttcaggccaggtgtggtatcttacacctataatcccatcactttgggaggccgagataggaggatcacttgaggccagaagtttgagggtgtagcgagctatgaatccagcctgggtgacagagcaagaccctgtctcaaaaaaataaataagtaaataagtacaataaaaaaataaaccagagttcattattcatttacagcttttccaagaaagccttattgaaatataattgctattcaataaagtgcacatatataagaaattaattgtacacttatatgtgtacacttatgaaatcataatcacaatcagaataaagaatgtatccttcaactccaaagacttcctggtgctccttcgctggctctttcggccacttcctagccttcctcttcccctttaggcaactactgatctgttttcttatcatagattattttgcatttactagaattttatataggtggaataacacaagttatgctgttttttggatttttttttcacccagcaaaattattttgaaattgatgcatgtaattgtgtcagtacttcattccctgttttgttttgttttgttttggagacagagtttcccctcttttgcccaggctagagtgcagtggcacaacttccgcctcctgggctcaagtaattcttgtgcctcagcttcccaagtagctgggattacaggtgtgcaccaccatgcccagctaatttttgtatttttagtagagacgggattttgtcatgttggccaggctggtttcgaactcctggcctcaagtgagctgcctgcctcagcctcccaaagtgctgggattacaggtgtgagccaccgtgcctagcctgcattcctttttattgctgcattcatttctttttattccattgtatgggtttaccaccatatttttagtagccattcatctgttggtggacatgtgagttgtttccagcttttaactacaactagaggtgctatgaacaagtagttatgtgggcatatgctttcatttttttttggtaaatgcctaggagtggaatggctagatcatttgtatgttttatcttcttagaatctgcaaactcgttggtacaattttacatttccgccaacaatgtatgagtgtactagttgctccacattcttaccaccctttaaatttaactgttatactatgtagtgatgtcttattgtggttttgatttgcatttgtctgatgattaataatgttgagctcatttgctttatatctttgtcgatgtgtttgtgaagtcttttgtccatttttaaattgagttgcttgtcttatttagacatattagggttctttattctaggaaaaatcttttgtctggtacatgtcattgcaaatattttctcccatgatgtggttctgttttcatttactcagcagtatcttttgaagagcaacagcttttagtcttgttgaagtccaggttattaatttttttttcttttatagtttgaaccttttgagtcttaaaaatatgggccaggtgcagtggctcacacctgtaattctagcactttgggagactgaggtaggtggatctcttgagtccaagagttccagactagcctgggcaacatggtgaaaccccatctctacaaaaagtaacaaaaattagatgggcttggtggcatgcagctgtagtcctagctgcttgggaggctgaggtgggaggatcacttgagccttggagtttgaggctgcagtgagctgtggagtgttactgcagtccagcctgggtgacaaaagaagaatgtgtctcaaaataatgaattatttaaaaaaatagatatatgtaatttcttgccaaactcaaggtcactgagactttcttgttttttgttttgtatttttaatgttttatagttttagatctctgatcaattttgagttaatttttatatgtggtgtgaagtagggtctaaattaatcttttttgcatgtggctattcagtttgctatacaatctcttgaagaggttatcccttcctctttgaattgccttggcacccttgcagaaaaagtaatgggacatacatgtgcgatctcggctctctgcaagctctgcctcccgggttcatgccattctcctgcctcagcctcctgagtagctgggattataggcgcccaccaccacaactggctagataatgaactcttaaaaatactttgtccacaccccctttcatttactcccatgtattactaatcctgctgaggccgtcttggtgtgacctccttcctcaccactgaccccctcttttctctctcagaacttccttactttaacaatccagttgaacacatatgccaccttattcagcagttgaatctcaacctgagagattctagtgttcattcttcagttccacacataaccatcgtgagtaagagaggctcattcccatagaaggatgaggtttaagattgctccagtcattaacagtatacaagatgtcagatagcgttttactgggtctaagataaattaggctgtaaccaagaatatttatatatcaaaccagcctctccacacatcccaattataaattctggacaaaatagaaaaagctacataatacctatgggtaccagagagcagccacaattagacagaaataggaaggcgactacccttggaaggaggaaatggcatgggggcagtttccttttttggccttttttgaacagttcctggaatgaattctggagtgttccatgtatgcatgggtcagattccaagcactccagctgaggctaaaagaaccaaagagaattattagctgttacttatgctagtattgggggaaaatattcaagttctacctaggtgactcttgaaccccttttgaaatgtgacaacgtagcagatgctgttgatgctgctgtccaccctttctgcccggttgttagcgtcaccttaggtgaccatcccttccctgtgagtctcagtggtaaattctgactagtgaaatcctgaccaggattcattctcttccttaccaatgaccagtttatgggaggctcatggtccagtttgattcctggcaagtgaggggacctttcaagaaaaggtttcttttcattgtgtgaaataagcctttttaaaattattttaagccattgtaaactgagggtttttattgttgttgggatttttgttttgttattttaattttggccaaaactaccgggttgaaagaccagtgttttacagactgacattctattgaatcttaaaatagaatatagcttctgattcttgtgttaagctttctgaagtaatttagaaacaaaaccctctatggattacatggcaaaaaaggcatgtttcaaccataaagtaaattgttttaaaaatttcccttaatttggccaggcgcagtggctcacgcttgtaatcccagcactttcggaggccgaggtgggcggatcacctgaggtcagcagtttgagaccaacctggccaacatggtgaaaccccgtctctactaataatacaaaaattagccaggttggtggcgggtgcctgtaatcccagctactcaggaagctgaggtaggagaatcgctggaacccaggaggcagaggttgcagtgagctgagatcgtgccactacactccagcctgggcgacagagcgagactgtctcaaaaaaaaaaaaaaaaatcccttgatttatgtaaggattagtcacttttgtatgcaagtagaaggctgaactcatgctttttattttttattttattattattttttgagacggagtcttgctctgttgcccaggctagggtgcagtggcacgatcttggctcactgcaatctccgtctcccaggttcaagtgattctcctgcctcaggctcctgagtagctggaactacaggtgagcgccaccatgcctggctaatttctgtatttttttttttttttgagatggagtttcgctcttgttgcccagctggagtgcaatggtgcgatctcagttcgctacagactccgcctcccaggttcaagcaattctcctgcctcagcctcctgagtagctgggattacagatgcctaccaccttgcctggctaatttttgtatttttagtagagacggagtttcaccttgttgaccaggctggtctcaaactgctgacctcaggtgatcctcccacctcagcctccggaagtgctgggattataggcatgagccaccacacccagcctgaactcatgctttttgattcttctgtatcactcaggctttctggaggtgcttattaactctttgctagattagataagttgctgaattcaaatttagaattctggaaataaatgtagaagggatgctttgagaagcatccttgtgctttcattgtgttatgctattttaaacttacggtaacttcgtgatgtcttaaaatttattttcattgatttatttgtatgtgactcctaagcttagaattcagttggaaagatttttgtttttgttctagtgaaggaagtacattgctcgaggatttttttgggttaactgaagtaatgctagttatctctgttacatgtagttaatgattcttgttgcccccagatttgttctaaacttaaacttttaaatgcatgctttctaaaacaggcaaagaagcagaaataatgaaatgatcactggggctttgtttctgtactggtccttatttaaggatattacaatgttcctaagttaccattttgactcataatatgtgatatgctaatgttccaagcacagagtattcttttctgtatgtttccacttcccaacctacctatggtgtagcgcctgtctgtaccactacgtgtgtgcatgtgtacatgttcctagctttttattcagtcctttatgtgctagttgattgttgagtgcagataaaaataatgtgttgtatttcttaaccacaatatttgatttataaggaaatattttgataacagcatttatagtaatatatgctcttactgattagaatgccacaattgatagaaaatatattggatgtaaattagttacatatttacataatctatacacaagtaacagcatattttgtcagcatagcgtacagtagccataaaataagagtgggtgatacaatagagcattggttcccagtatgttctgtggtacctggggactcttgagaccctttcagacactctgaagtaaacaattttccataatagtttttcctgctctcattctctgaggattgtgcagtagagttttccatgtaacagtagagttatatgatatatgttatcacagcagattgaatgcaggaaccagatttgagaatccagctgtcttaagccacatgttaaagagatttgtgaaaatgtaaaacatttctactctaatgaatttgtcataaaaatgttacttctaattgttaacattaaatgggctattcttttgaaatacatttttaaaaatttcttaattttaacatggtaaatattgatatatacaacatgtataagccaaagctccttgagattgtcaatatttaaaactgtaaagcccagaaaatttgataggcactgtcctgaaaggtgactgggtagcctcttgagatagggtgatgacagtcttctctgagagtgtggcctttaagctgagattctagacagaatgagcatgcctcctctgactactatgccccactccacttccacattcttttttagccttagtataattacttccatgtcaagtcaaggacttttactcattcatttctgaattcctgttgcttaccactttacttactagtcattaataattctttacggccagacgcagtggcctacgcctgtaatcctagcagttcgggaggctgaagccagaggatcacttgagtccaggagttcaagaccagcctgggcacataggaaaaccccatctctacaaataatttaaaaattagctgggtgtggctgggcgcggtggctcacgcctgtaatctcagcactttgggaagccaaggtggacagatcacgaggtcaggagatggagaccatcctggctaacacggtgaaaccctgtctctactacaagtacaaaaaattagccgggcgtggtggcaggcacctgtagtcccagctactcgggaggctgaggcaggagaatggcgtgaacacaggaggcagagcttgcagtgagcggagttctcgccactgcattccagcttgggtgacagagtgagactctgtctcaaaaaaaaaaaaaaaaaatattagctgggtgtgttggcatgcgcctctggtcccagctgcttgggaagctgaggtgggaggattgcttgagcccaggagatggaggctgcagtgagctgagattgcaccactacactccagcctgggtgacagagcaaaaccctgtctcaaaaaaaaaaaaaaaatttacctttcagtggaattatttatatacatttctacacatgagacaaacttttgaaggaagtttaatgtctttggtattcacatcaaactaatttgacatatatttttatttagttttttttaaaaacaaatattttttaggatctgttatttcctattaaattccttttacatgaaagatcataaattgatttttaaaaatgacttctaatgttaatagggctttgtcttttagacatatttgttaatgataaatttgtttctgtaatttttatgctttgtagctttaatttgggcccatacgtaaagactatgtagttttattatcattcctgccgtcatcatccttgatcataccatttaaaagcaatagaagttttaaatggagtagtagagaaagacaatcaggaattaatgagtttagataaaataagagtacaagcaaacaaagttgattgtggccatgttatgaatgcgtgagatttcaacttttaacaaattaataactttttttgaacacttagtgtgtgccaggcactattcccacccctctgcatgtactaactcatttgctcttcctagcagccctatagacaggtactattatttctgcttttcaggcgaagaagcagaagttgctcaggatcacacagctgttagtgccagggcaaggatttgaaccccgtcattaccatgctcataactaccggactatgctacctctgaagaagagattatacagcttgttgtggcacaacacaaaaccttaaaatgttttcagctcttttttttttacccatccttattttttccccatatgactattatttattcagccttttggtatctagcttgcagaatatttcagggtcccaaagggactatataaagagctgtctgtaaaagttctgctttcctcccaaaagctagcagtgggaaaaacaggcaggagagataaggtgcaaagcacagggaggaagaaagagaatagtggaagcagcagtggtgatctgtagtggtgtctacagtgtgctggttctggttgagttggtacgggcagccatgtcagcaaccaagtcttcacttgttggaggactcgctttttacatgctctggctgggatggttttagttactaggatgtaggggacaggaataacggcatttggtagagattcaaaacagcaaccagggatgacgagctgcagacattgatcgatatcaagtaaataataagagatagaagataaaacagctctcaggtgccagaaagcaacttggtaatggagaaatacatatcctagagaaaggtagacaagtgtatttatcctctcaggaaattacctggataagtgtacatttctgcaaagcaaaatagagtcaagctcctgaactcctgctgcataggctggtaggtgttaatgggtgtctgaatggagaaggatgaggacttcaggtttctagtaaacttaaatgtgatatggtttggctgtgtccccacccaaatctcatcttgaattgtagctcctctaatccccacgtgttgtgggaggaacctggtggaaggtaattgaatcatggggggcaggtttctcctgtgttgttcttgtgatagtgaatcagtttcatgaaatctgatggttttataaatggcagttcccctgcacaagctctcttgcctgctgccatgtaagacatgcctttactccgccttcacttgccaccatgattgtggggcctccccagccatgtggagctgtaagtcaattaaacctttttctttataaattacccagttgtgggtatttcttcatagcagtatgaaaatggactaatacataatgattcccttgtttggaggattgtcagatactatatgaaaagcggtttcacatgtgcttaaaaaaacctgtatatgtgccttatggtgtcattatttctaatttatagatgtagaaataataatatttagagaaataaaatgctttttctaatcacatgccagtaggagatcagcaagctgggactagaactcaggttattttgattgaaattcttttttacgaagccctgagggttctaaaaagctcgagtttcactgtgaaccattgtatggaaaacttaaatgtagccagaaaccacatagagaaaataaccaggttttaaatgttttatagtataatatttgttgtggtactcttttatgggctttaagaatctagtatgctggagggctggggtggctcacgcctgtaatcccagcactttggggaggccaaatcaggcagatcacttgaggtcaggagttcaagatcagcctggccaacatggcgaaaccccgtccctactaaaaacacaaaaattagccaggcatggtggcgcatgcctgtagtcttagctactcaggaggctgaggcaggagaattgcttggacctggaaggtggaggttgcagtgagccaagattgcaccattgcactccagcctgggcaacaaagcaagaccccatctcaaaaaaaaaaaaaagaaaaaaaaagaaagagaatttagcatgcatttaggtaaccacagagataaaatcatattcaaatgtgcttgtattatgagtattactcttctttatgagtattctttggaaaaactattgtcacacaataacatattaattatatctttattcatttaccatatttgaaattctcattaaagttttaaaatgtattttaattataaaaataatttacttaaaaagttaataaatactagatgtctgttcacacttcatttttccactgtaagttgcagattagattatgatgaacagactataatcttctaatattctgtgccctagtaaatgagtccttgcttatgtaagtcagatattttgttattttgatatctaagtaattggttattatgatttatttttttcttgacaagcttctgagctttgttcagtcttgtcaagtccctggtgagttttagatctctgagtctagagtttgttgatcgaattaatgaataaaccaatagattagtacattgttgatttttttttcccccaaaccttagatcctatttgctctcttaggaaactgtttgaaagtattgcaacttttagagaagttttgcaaatcttagccacatgtctactaatgttttgcacactatttttagttgatgaaatgtaagcaatttatatttgtcttaactttccatctataaggtagtgagagtggtgacaggctgctctgttttgcagctagcatctttaattgatgttgaattgtggctttccgtgcacacagggttaagtgaaaaggttgcagtcatctagtgagcattttcctttaatgtgctcattagtggtggcaagtccaggtttcagcacatgtcagtaatttacatttcattgtggagaggctgcccttgttcaagagttgtttctaagcctgatgaatatatattgggaataaacagagtagaagaattgaaagccaaataccctgccaggcctttcagttggttctgaagcttccagtggatctctgattagcaatgcataaagcaggatgaaaatgcaaagatgaggcctacaaaagttgtcgcaggtagcttctccccttaaatcctctttttgtgactgcttttccatttcatcttctccaaattcttttttcatggcagacttcgttaaagtgaaaatactctgtgttagacgtaagatgtgaatactacaggatctacctggttcctgtaccccttctaactatgaagccaagtctgatcgttatgcaatgagttttcagaagcaaagggcttgataggcctcggttcttagggatcagatgattgtgattggaatctttgtgatgattccttctgggactcattttttccatctttgcctgattggtaggtaccagcttgttctggcttttgaaagcttgcatagatcagtaaagaataactgtggaggctgtggtcagtgttgttggggatagagacaggactctgaaattgtggtgtttgggaaaatccagaaattttctttttgtagaaaaacttcatatattaaaatgaagcatttttggaacttgggatttgattacaagttacttcatgcatagatggtgtagctttagaaaactcaggcctagctgtttttagaagaaaatgttataattctttatacattttaagtttaattatttacatgtgtataaaaatttgggtttattgcaagaaggtacgttttgatattgctgtttctgtgtgtttgtatgatacatctacccatgtatctgtctacttatttatctttgtggtgctagtcaaaacttgcagcttaagagaatttgttcagaattggtggttagaatcaaaagtgagtgaatttatgacttacattattgaaaaacattgacaaatgtcaggactcaagtccgatttttattattttactgtaaatccagttagatgtgatttagcacttggatcatttaaatataaaggcatgttagtcacagtttaagtctttatattagtttttttaattaggtagagttttaacagaggagcaacatggaaaatgtttatgtgtatgaggataaaaatgcaagtcttgagaatattagtttagtaatgttctgattagtgtttgtagcctttgtaaaaaatgtaaatttaccttctagatgactacttgaaactgttgtttttggatgcttgccagataaaagccctgtgggattaagttctggtaaatcgcttgcaaatttgtgagggatatcagtgactttgagtgtttaactgtccaagctgtcatctacatgcgtcctatcactgcattgggtgaaaaaattaagtttctcagccagttagaattaaaggtgacatctgcttttaattggtgttttattttcttccaagtcagtaaaaattcagtaagacatgaattatcaaattttgcaatgctaagcaacttgtcaagtgacagtaagcactaccttgagcagttgtacagatgggaagtgttaaaatgttgattaatcttccagagttctgattatgagaagactaaagcttatatcatcattgccagctttctagtgtcagagtagtatttatttgttaattttgtagacctttttcaattactgacaaattgtgtcttgcataatgaaaattttactagttttaataagacttggtctattagactaagggtcatagatggcaatgtagaattcatgtttctgttgtctattatttagtaaacatattagattctttttagtaaaaaactgaaaaaaatctaaacgtgagctttaagttttattctgttatacacattcatcctgtgttgagaagggagtatctgtttgaatcttggcaaaggaagtcttgcctgggccccctgttgaaaaagaaaatggattatttctgtttttaccatttataaaacattttaagatgtaaaacataaggacgaaaaaaatcatcaccttcaagtagtccatgtaaaaataactcaagtcttcaaacattctcagaactaaaaaagaccaaagaaaatattcccatcatactgattatgtttcaattttctagttactaaaaattagaacatggcactaagtagactatataaagtatgtctttaaaaattcaactgtgaaggagatcttttttttttgataatcattaatatgaaagtgaagtttctcttttccctgttataacagttctatgtagtagtagaggtagaattctgaattgaaggtggttaggacttatagcaacatttctgggatgagtttttcagtattcccagacttcaatttaattcagggtttcttttttgctctccacttatgaatatgtgataaatattttatgtagtcgtgtacttttgctatagaaaatcagtggattatttaatttgattcaggaaatctaccctgtatggttatttcgatgttgggtagattttatttcaacttaaaacgtagaaaagatgcttaggcaaatgatctaatagttttagatacatttggtaacttgtatcttaaaccccagggccaagtttagcagtcttacacatgtttagaaaatagttgaaaaatagaaaatttaggtctttttaggtaaactatacaaaacacttttatagtcattttgatgcctgataacttcagggttcattgcccctgtacatttttcaaattatttgcttctcaatccataaggctttaatttaccccctactgacaaatcccaaatgggtttttaagaattttgagagtggtctgctgtagttgtgcttcagcactggcttcaattgctgacacagaatctcttaagatgcaccaaatttagaaggataggaggttcaggcagcatttcctctggcaaatactaagattttatttgcggagggtggggacggagatacagaattactgttttctgtaatatttttctttctttgatcctgttttaatgcctgtttattaaaaaaaaataatttagacacaagatttagccacatttttttaattaattaaaatgtgtgggccgggcgcggtggctcatgcctgtaatcccagcactttgggaggctgaggcgggcggatcacaaggtcaggagatcgagaccatcttggctaacactgtgaaaccccatctctactaaaaatacaaaatattagctgggcgtggtggcaggcgcctgtaatcccagctactcgggaggctgaggcaggagaatggcatgaacccgggaggtggagcttgcagtgagccgagatcgtgccactgcactccagcctgggtgacagagcgagactccttctcaaaaaaaaaaaaaaaatatatatatatatatatttgtgcttgtttggatgggcttttttaatcttgaattttatagaataataaagttaagtatttgtaccttgacataccctaacacaattaagtattgcttccataaataattttgatcttataataaacataccttacatactgacgaataatattaacacaaatgtatactcccttagaggtgctcaaaatgactttcatgccacccttcatgcctgctgggttttaaggcataagagaaacagatgatttctgcattttactggaaaaaaaagactaaaatgtacagctagtattgaattggggtaataatctgccacttttttgcccttcaatgctgtcgtgatcttttagggaagtgaggtcatggtagacccgcttgttaatcatttctgcgttttcagctcagtttggtcatgaatacttgacttgctacctatagtcttgcttctgtttgcctctttgcatgcagctccttaaattgtttaaattaccatgctttctttatcatgtgatcctgtcatctattgacaattgattggatcaaggattagtgcctgacccaaggcagacatctacagaagggtcatcctcttcccacaatggtttattttcctgtctgtgtgtgtgtgtgtttgtgtgtgtgtgtacgtgtgtgtgtggtggtcatgaatggtggtggtgccaagaaggttgtgacatttgactaataactgatgatgagagaagcagccagcacttggagatctagagtaagagctctccaggcagagggaatagcaggtttaaatgttctgaggctggaatgagatttgagacatagaatatagagattggatatagagaaaggaactggtgtggcaggagaatcatgaatgagaaaacacgtggtacaagatgaggttgaaagggtaggtggctcagggcagatcagttagggtcattctaagaagctgggatttaggtctgagtgcattggggagctgctggaggagttttaagcatgtggtgcacttctgtatcacttctgacctaatgtgatgcacttctgtatcactgtaacaacagtgcatatcagactgaagaactatgtgattaagaacactttgctacataggagcagaaaaatttaaagaagaaacagtgccctagaagaagttaaattctcttgggcatccacctgtagacgtcctcactccttaatttgtcctgctgttcttagcatcatagctctctgtgaaaacaaagctatcttctaatttatactttgcaaatcatttgcttttccgtaaaccccattcttgcctattggggttaatctaataccaagatccaagattcctcttcccacaatggtttattttcctcaggctggattattcagtattgaaaaacagccccataagacaacccatgggaaccattgaccattcaggtcctaagaacagttagagttagggggtaggtgtggatacagaggttgtatgtatgtggtattccagtttaaggtggccactctcttctgatttctttctcctctgattttgtctcctccgatttctttcccctggtattaattactaatacgcttctttgactttctgtctggctagtaggtgaggttacgttgcacaaatgcttaaatgaatgcatgtatattggcatccttgtatatgggcttatgtttgcacacaaatactcaaattccagtgaagtttgctttgccaacatcctttccaccacaggtgatttgtggaagccagtcaggatcattttatcttccctgacaattattgattcagggattaatcaaggcttaagccattgtgggccactgaaacatgatgaaaggctttcctgggattcctggaaaaggaacctccttattcttaagagaaagacattggaagccaggttctcttgcattctcccccacccaccaccttgtgaatgagagagcttagttgctgctggcagccatattgtgaccatgagggtagctagcctgagggtaaagctgacttacagaataaggcagatctgagagaatggcagagaaatccagaattgggagatatatttttggaagaatttctgtctaaaagtgttggtggggtatgtgttatggcaagaagagagctgggatgtttaatgggttaacagcattttgttctttatcatatatttattgaaaaattttcctatcccattgtgctaggcactgaggaaattatttaaaaaataaagtagggcacagaacttgcctttccaggaaactcatttacaggtattgggttttgattctttctttctttcttctttggaaacagggtgttgctctgccgcctagccggccaggctagagtgtggtagggtgctcatggctcactgcaccttctgcctcctgggctcaagcaatcctcccaccgtagcctcctgagtaactgggactacaggcgtgcaccaccatgcctggctaatttttgtattttttgtagagatgtggtctcgccatgttactcaggctggtctcgaactcctgggctcaagtgatccgcttgtcttgattccttgtataactgccccttgtattggatttggggactgaaagaacacttagttactaatattcttttttttgtttttctttttctttttttctttttttttttttgagatggaatctcgctctgtcgcccaggctggagtgcagtggcgtgatcttggcttactgcaacctctgcctctgtgttcaagcgattctcctgcctcagcctcctgagtagctgggattacaggcacgcgccaccacacctggctaatttttgtatttttttgtagagatggggtctcgccatgtttctcaggctggtcttgaactccagggctcaagtgatctgcttgtcttgattccttctataactgccccttgtattagatttggggactgaaagaacacttagttactaatattgtttttttctttttctttttttttttttttttgagatggagtcttgctctgttgcccaggctggagtgcagtggcttgatcttggcttactgcaacctccacctccccgttcaagcgattctcctgcctcagcctcctgagtagctggaattacaggtgtgcgccaccacacctggctcatttttgtatttttagtagagacggggtttcaccatgttggccaggctgatctcaaactcctgacctcaggtgatcctcctgcctcggcctcccaaagtgctaggattacagcactgtgcctggccagttactaatattcagttttaaattttagaaacctagtacttaaagcacattaaactttgcttactgtggaaccagtgtcagggctgtgagttgccttcagtgatgttgctgggtagccaggcttatctgtgcgttatacgtgggtgctttgaggaatccaacaatgagaagatagctagccttgaagacagcactggaagcagagagtagccagcagtcagtcagtcttctctctgagtttatgctccattctttgaggtgtttctgcaagcctctctgctttccacctctgcttgtctggcttgcggccctgttggaacatgctgacttcattgctcctaagcctacatgatatagaccagggatcctgaaaagaggaaagcctctttttctctctgtccccatgccccattcctaggaaagggaccctgataggtctagtttgggccagctgccttttgccactcccgtctgttcagagagcaagattatgccattcacaaggtctacaactgaagaggtcttttgctgagtttgggaaaagggcagttcaggaaaatcagactaactctgccaccaaatgtctcttaaaccacataattatgggacagtatgataattgcagcaatcaaaggctgttgagtgttgtgtacaggaaggtagtggttaactctggtaggttgggggttgggtacagctgaagagaagattgtcaaacttcacataaagggtctgtgtgtgtgcgtgtgggtgcatgcatgcgtgtgtacgaaggattcatgagggggagtattttatattggtgtaggtgttggtttcctccccaagaatttattcctatcataaatactctctgtgcccctgtgacagtttcataactgtggtatcattagcgttacaaagtacagaagacagaataaaatcatggactttttgagctggaaagaccttgaaacttatctaatttgtttgacatacatcttttgatgtggcagattctggtaaatataaagacaaagcaggttccctaccctgaagaagtttatagggggactacagcagggaagaaatactgggaggagtttctctgattcccaggagaggatagctggccatcgggggaagtcagatgacgaagtcatccattttgatggaggagatgtgcccagaaaggcttcatgacgaaggtggcatttgaagtaggtcttgaagataggtagtgtttaggcaggggagatgatagaggagaagaatgggacacacaggtggaggggacattccaggaaggggctgtagtgtcgggatggcagaaaaaggggtgctgcattgagccatgagctgtgacagacctttgagtgtaagagtgtaagagtaagcccggaaggcgaggggccctgggtactgggcttgaatttgtttataccattcaagctttccagaaaacccctgtgagctttgaaatgcttcaggggagcattctgtgtgaggctggctttttctgcccttttcctcaattcagcaaatggcaagaaacttggtatcatctttgcccacctttgctgttaggccgtgtgctagtctgttcttgccttgctataaagaaatgcctgagactgggtaatttataagaaaagaggtttaattggctcacgattctacaggctgtacaagaagcgtggtgtcatctgcttctgaggaggcctcaggaaacttacagtcatggtggagggcaaagaggaagcaggcacgtcttacatgaacagagcaggactaagagagagagggggaaggttataactatagtagttattgcttcctgatagataatttgtttgtttctctttctcctctgctgaaatacagcctacacaaccataggagttcctgtctcttgattgttgctgtttcctcagtacctaggacagtgtctggctcatatatatttgtttaatgaacaaatgaataagagatgggttatttagctttaggccattcatggaaagtttaataccataaattctctgttaagtaggcagatatttataaatacagaaatggcttctaaggtgtctccgtaagatagctattcaactgttgcacgagcttatgatgactggaatcgtacgccctttcatcatatagaccagcatttggcaggctttttttctgtaaagggccagataataagtgttttaggctttgtgggccatactgtcacaaccattcaactccattctaaatactcagctcttctgttgtagtgtgaaagcagccctagactataggtaaatgaatgggtatggctgtgtttcaatacaactttcattatgaatacttaaatgggaatttcatgtaattttaacatgtcacgaagtattactctgcttttgatttttttcaactatttaaaaacataaaaaacctttcttagctcatagactacaaacgtggtgggctggatttggcctgtaggctgtaattggccagtacttgttatagagctttctgtcttcctcatctttaatggttagaaaattcttcattgtattaactgaaatctatctgtttagaatatttacctattttttcagtagtgaaataggacatatataccgaaaaatgcacataatgtaaatgtacagctttacaaattattgtgggcacccacataatattacctaggtcaaaaagtaagacaaatgtctgcaccctagaagccctttgcatgttcccttcaaatgatgctccttcctcccatcccaggaacactgtcctaactattatgggaatcattttcttgcttctctttatactttcacctccttaatatgcatcctatgaccctggagtttagttttgcctatttttttgaactttctatagatagaatcatatagttaaaaaaatttgctttctgtctttgtttctttctctctttttatcttttctttctttctaatattttctttttttctttcttttgacagttttgctctgtctcccaggctggagtgcagtggtatgatcatggctcactgcagcctcaccctcttgggctcaggtgattctcccacctcagcctcccgggtagctgggaccacaggcacaagccaccgtgcctggctaattttatgttttgcagagacaaggtctcaccatgttgcccaggctggtcttgaactcctgggctcaagtaatatgcctgccttggcgcctcccaaagtgttgggattacaagttttcttaaatttctttttctttttttttttttttgtgagacggagttttgctcttgttgcccacgctggagtgcaatggtgcgatctcggctcaccgcagcctccacctccgaggttcaagtggttctcctgcctcagccgctcaagtagctgggattacaggcatgtgccaccccgcctgactaattttgtatttttagtagagatggggtttctccatgttggtgaggctcgtctcgaactcccgacctcaggcgatccacccgccttggcctcccaaagtgctgggattacaggcgtaagccactgtgcccggctaaatttctttcagtaacatttattagtttcctgcttagaagtattgtgcattttcactgtatttattattagaagtttgagtcttaaaaattattcagttttctctttgatttcagtcttaccattccatctagttaaaatagctttgaatcaatattttatcattctttttcagcattggttcatcattgaattaggcaatcagtgtctttgtgtggcgttatacaagtatttagtaaaaatatccattagggaagggccaaaagtagagtagggctttttagttagacaaaaatggactattcaatgatctggatatggcgtttgaaacaattgtgtatctgtacaaatatatttagtttaatacacacttgtctgtgttgtccataagcacacatttgaatatggccacgagaaagattttgggtgaccatgtggataaaaaaattatttggtacagttatttctgctaatggatggggaatgtatagtaatatggaaagtacaaaataggggccgggcgtggtggctcatgcctgtaatccagcactctgggaggttgaggtgggtggatcacttgaggccaggagtttgagacctccctgggcaaaatgacgaaaccctgtctctactaaaaatacaaaaatggttcaggtgtggtggcacgtgcctgtagtcccagctactcaggaggctgaggcaggagaatcacttgaacagggaggtggaggttgcagtgagccaagatcgcatcactgcactccagcctgggtgagagtgagattccatctcaaaaaaaaaacaaaaaaaaaaagaaaatacaaaatagggatagtgtagaagaaatctgagaatgttttctacaatttaatgtgtatcacctagtaactatatttaataatactagatttatattctcttaagtatatgccaattgagaattgtgcagtgagttcagggatgctgtgaaggaattattttcagaattcaaaattttcaatggataattgagaattaattgcaatgatgaaacatatgtaacatgtagtagcttatgtaaacattagtgttagattagatttgtaaaattcctagttttcccaaaatatttgaattatgctgtagaaaagtccagggactcactcctgcaaccctaaatgtagctatactgatacaggatttggcagcctaatagatgtagggttggagcacaaagaagtttaaaaatactccattccatggatgtttaatagatttatacctgttgattattaatttttgagtttgtggattaggtattatcctccatgattaaaaaaattggagaaagaggataatcactgtaagaacgaatcaagattatgactttgtatgttcagaccaacatgggaagaagaaattcttggtaatacgtcaattgggatctgcgataggctggagaggtttttgggcagatatgggaaataatgctatttttagtctgttcactttcatcaagctgaccacaaggtggggaataatacattatatgaggtctggatgacctgcgatatcatccagagttataatagagaattatattactttaaagaatgtattttttaaatttggatatttacacatgagttagagtcaaacagtgtttttatagctatatcttgactagttatgccaacaataattattttttaaaattgtttctcagtactgtaaggttcttattttattgttgaaaaaaacttattttaagttcaggggtacatgtgcaagttcgttacataggtaaatgtgtgtcatgggggtggcactctttttatttcagtaaatttttgggaaacaggtggtatttgattacatgaataagttctttagtggcgatttctgagattttggtgcaccagccacccaagcagtgtacactgtacccaaggtgtagtcttttatcccccgcccccttcccaccctttcccccaagtccccaaagtccattgtatcattcctatacctttgcctcctcgtagcttagctcctacttatgggtgagaacatacgatgtttggttttccattcctgagttacttcacttagaataatggtctccactttgggaggccgaggtgggcggatcacgaggtcaagagatcgagaccaccctggccaacatggtgaaaccccgtctctactaaaaatacaaaaaatagctggatgtggtggcacatgcctgtaatcccagctacttgggaggctgaggcaggagaatcgcttgaagccgggaggtggaggttgcagtgagccgagatcgtgccactgcactccagcctggcgacagagcaagactctgtctcaaaaaaacaaaacaaaacaaaacaaaacaaaacaaaaacacaaagaaagaaagaaagaataatgaattccatctggattgctgcaaatgccattttttcattcctttttatggctgagtggtcgtattccatggtgtagatataccagtatttatctactcgtcaattgatgggtatttgggctggctccatatttttgcaattgcaaattgtgctgctataaacatgcatatgcaagtatcttttttgtataatgatttattttcctctgggtagacacccaataatgggattgctggatcacatggtagttctacttttagttctttaaggaatctccacactgttttccatagtggttgtactagcttacattcccaatagcagtgtaaaagtgttcccttttcaccacatccacgccaacatctaatattttttgattttttgattatggccattcttgcaggagtaaggtggtatctattgtattgtggttttgaattgcatttccctgatctttagtgagcatatattgaagtttgttggccatctgtatatcttcttttgagaattgtctgtacatgtccttagcccactttttttttttaaattatactttaagttctggggtacatgtgcagaatgtgcagttttgttatataggtatacatgtgccatggtggtttgctgcacccatcaacccgtcagctacattaggtatttctcgtaatcctatccatctcctagccccccaccccctgacaggccccggtgtgtgatgttcccctccctgtgtccatgtcttctcattgttcaactcccacttatgagtgaaaacatgcggtgtttggttttctgatcttgtgatagtttgctgagaatgatggtttccagcttcatccatgtccctgcaaaggacatgaactcgtctttcttatggttgcatagtattccatggtatatgtatgtgccacattttcttaatccattctatcattgatggacatttcggttggttccatgtctttgctactgtgaatagtgccgtagtaaacatacgtgtgcatgtgtgtttatcgtagaacgatttataatcctttgagtatatgcccagtaatggaattgctgcttagcctactttttgatgggattgttcatttttttattgctgatttgtttgagttcgttgtacattctggatattagtcgtttgttggatgtttagattgcgaaggttttctcccactctgtgggttttctgtttgctgattgtttattttgctgtacagaagctttttagtttaattaagtcgcatcttttatctttgtttttgttgcattttcttttgggttcttggtcttgaagtctttgcttaagctctttgcctaagactttgtctctatatttaaaaaaatatatgttgcccaggctgctcttgaactcctgaactcaagcaatccccttgctttggcctcccaaagtgctgggattacaggcatgaggcactgtgcctggctgcattattattttaaatccataaaatcacacctttttcagcttaagatcatttctagactgtcctctcactaaaaataccctggaatcaatatacatgttgttagtttgaaaattctttgctaggttgaacagccatattggaaaagtaccaaatccctttagggttttgttattggtaatataaagaggacagagaatgtatttcaaattagttgtcatttcatgaggtgttgcccttcatttcttggcaggtcttaactagaatctagcctcctcttataatagttgaaaatgtgtcatgactaattaatatgatacaatgagagcactgttttctgattaataaggtgggtggaccttatgaaatgttatctgaagatcacgcacgtaatctttgatggctgttattgcgttatattgacttgtgattcctgtgtgttcaacttctagtgtgaatagtaaggccaaaaattcaaaagggcttttgaagttgatttgtaattaaatagcattattaaaataaagagtcaaagcattgtcaagtgtgataaattcagtgtcaaaactgagcctttaaaaccaaaaagcgtggctgggcgtggtggctcacgcatgtaatcccagcattttgggaggcctgggcaggtggatcacttgaggtcaggagttcgagaccagcctggccaacatggtgaaaccctgtctctactaaaaattagccagatgtgatggcatatacctgtagtcccagctacttgggaggctgaggcgggagaactgcttgaacctgggaggtggaggctgcagtgagccgagattgtgctattgcactccagcctgggcgacagagcgagaccctgtctccaaaacaaaacaccaaaaagctcatgcctgttatgctagcactttgggaggccaaggcatgaggattgcttgagcctaggagtttgggaccagcctggacaaaataaggagaccccatcactacaaaaagtaagaaaaaggggctggtcgtggtggttcacacctgtaatcccagcactttgggaagctgagataggtggatcatgaggtcaggaattcgagaacagcctggtcccatggtgaaaccccatctctactaaaaatacaaaaaaattagccaggcatggtggtgtgcgcctgtagtcccagctactttggaggctgatgtgggaggatggcttgagccctaggtgtcaaagctgcagtgatcacactactgcactctagcctgggcaacagagagagagatcctgcttccaataaaacaaaacaaaacgccctcctcaaatcagaaagcattctcaaccatagtacttccaagcaccctatttgtgttagaagtgtttaaggcaatgataaagtcagtaaactatttcaagctgttggaagtgcatctcagcacacgacagttgtgatttcataagcttcttaaggtttcaagtgcacagcattttaccgcagaactattactgtctcaggaatgaggcccatggaacacaggaaaattctccacccagggaggaaggctgggaggcctcagcagccaatagtggtgtgactgagactctggagtcccttcacacttgtgtcgcagcttactacgggtcacctccgtcctaagtgtcttacatttattaatcatatatcctcacagatagggaaactgaggcacacagcagccaaggaactcgtccaaggccaaccaggtagtatatggtggaactggagtgaaggcaggctccacagtccctgttcttaacctttatactccactgcttctaattccttactttcttttatacaagaatataatttaaaatcctgcccaacacttgttttgtaagattctagtggcatgggaagtgaggggttacagttggtgtcagtcatatttcaaatggctgggaataggggtgataacatacacccaaggaagtcacgctggctgctacaacattgtgagaatatcattctgctgagattttacgcttgctggtagttgacataaaatgaagcttagtctattatatacaatgccagctttttccttcatcagttacaaggcttgactttaatgaaaggagaagactgcattttcaagtttgatctagaaggctatgaaggctctggttggaattattgagaaagacaaatctcaggtgatctgaacgtgttaaattgtaagagtacttaatgtgaattggaggaagcaattctctgaagcaaagggggaggaatttgtatcttggaaagaattgcctttgtcttttattatttatgcagttgataattgcaatattgccacttcacatatgaaaatatcattgtagtaaatttatgtagagttggctaacaaagttcccatccatctttgctttagttcaattgccattagtttcccagagtactttctaattcctctaccacagtactcatgctttattttgattttaattgtgttatattttctcttctagttagtcaaataagcgaggtcctggtgcacctctgtcttgtccatcattgaattcctaggcttaccacagtgcctgacgtagagttggtgttggcagctatttgtaggatgaatgaatacatgactgtgttaagcagacatcaaaggcgtataaaattgaaatctagttgttgtaagacttaaaaagagaggagatccttatagatgagtgctggttgtttgcaggatcattattattctctgatgatcaaaaaactgtttacgcatgcaccagtagtcccagctactcaggaggctgaggcgggaggatcccttgagcttgggaggcagaggttgcagtgagctgagatcacgccactgcactccatagagccagaccctgtcttaaaaagaaaagaacggtttacagatcagtgagagaggtgttttcctaaatatttaaatgtttgcttgcccatgctacttttccaaatcctaattgtccttttccccctcaaatgctccttcctttgtgaagccgtccttgattcccttgttggactctgttcaccgtgtctgatttttacctcttctagtgcactgactattcttaccgtgtattgtttttattttttggtacatgtgttgttgtttgttctactagactataaactcttgagtgtgaaaaccatgtctacttaaccagcctgcttccgagagtgaaaagggacgctaatcagataggacaccgagtaatagatgtgttcaaggctgtgcgaggcaaacctgatggctggttactctccagtaatctttagcttattgaaaaagcagaggccacttgcacctgtttacaagcaggtgagatgggcctgagaaggtgattgaattgcagattcaaaacgctggtttgtgtcttagtcttatctctgtcacttcactagtctaatgactgtgggtaatttatttcatcttgaagaccctcattttactgacatgttaagtagtgatgaccatttatttcctgctgtttcttaggccccctcctttttgtgttttgaggaagagaagatataaaaaaacgcccttgagagctgtgaagtgtcatagatactacaatatcgttttagaatcaattgaagactttctaactttgtaaacaaatttgaatctgatgactgaaatgctaatctataaaatggttttttagtaataaagtgagacttaatacagtgcttttaaatagtatgaaataagtaaataaatattgtagtttttgttagtatcattatattccttgttcttttaattcatttttaaacttagaattgtttcctacagataaacaaatgtcagcttgggtccatctactacatcttattgtcactttcacttcattgcatcattgctcttaatcagaataaagggtgaatttagcaggttgtagggtttgagtagtgctaagtattgtgaggaattgtgctcaaggtaattaattataaatcatagtccgggtgcggtggctcatgcctgtaatcccagcactttgggaggccaaggcaggcagatcatgaggtcaggagatagagaccatcctggctaatatggtgaaaccccgtctctacaaaaaaattatcctggcgtggtagcgggctcatgtagtcccagctactcgggaggctgaggcaggaaaacggcacaaacctgggaagcggagcatgcagtgagccgagattgtgccactgcactccagcctgggtgacagagcaagcctccgtctcaaaaaaaaaaaaagaaatcatgatctctgctattttaatattttgctcagtatttgaaataagctttataatgtaggctatagtaaaacacagcaattaagtgcttaaaacaagaatatcccaactgtaggtacagcatactttacctaaactatatgactcttatttctatccagcaatgggatcaaaaacttgatgcatttcagaaaacacgaggttaagcaagacgtgggaggattttgacttgtggtaaattttgaaagaaattgtaaatattttcaaagaaaatagaaaaagcacacaattcagagaatatacaaagccaattaaaaagttgtaaaattattattattattattatttttgagacggagtctccctctgtcgcccaggctggagtgcagtggtgcaacttcagctcactgcaacctccgcctcccgggttcaagcaattctcctgcctcagcctcccgagtagctgggattacaggcgtgtgccaccacacccagctaattttttttgtatttttattagagacggggtttcaccatattggccaggctggtctcgaactcctgaccttgtgatctgcccaccttggcctcccaaagtgctgggattacaggcgtgagccactgcgcccggccgtaaaattaaatttaatatctgatctgacggactaaacaaaagatctcttgcctttcaccagtttaccagctttctgttctttttcactcttagttcactaagtgtgagtggactgtgaggcatgagcaggaaggggtggcattgggcatttacagcaagagaccctcatgctaagtgaagtgttatcaaatcttcatttttttgcttatactgtaaaattgccaattatattcatagttattgtaagttatattccaaagtttaactggaaaaatattattttgcaaccaaaaaggtaccaattaatattcctgttcatgaaacaataaaaagaattgaatcagggagaaatgaaaacagctcattttaaatattcaaatttaaaatgatataaaatagggatataaaataaaagcattttatatgaggtatagaggaaagaaattacaacttcaaaacaaatccttgtgatcagcttccatgaggaggaccttagcaatgtataccaaatttaaatgtgaagcttcttaccttcttcttacctcatcttcttaaaagatacatctaaaagaaaaactaaaatttgtatcgatatgtttaattaaagcattattgttattattatgtaaagcagaaagaaacttctgaaaaatagttgagtgatacatttaagcatttcacctaaggaaatttagtgttatttaaactgattaacagtatttggcaaagtattttcattagcgttctaatattaaagctagcatttccttaaaggagggaggctaaaattcatcccaaagcttgtttttgttaactcaaattttctcagtgttattgctgaacaagttactgaattttctctgggtatcttctatattgcctttctttgattcttgtcagtgcaaccagtctaaggttttacatgataaaggaaatctgtggagctaatcctagaaacctctttctattttcttacctaacacctccaggcacagagaagacaaaatacttcatttgcattcttaaacattaggaactcagaataagtctttcaactggaaatgttattgcatctacatttcccgaagagaaaaaggttaacagcctactcaggtttatgttaactcatctctttttagtatcctgatgtgcacaaagagtgaagaatgtgaggcttacccacccaggctctttcttctttacaatcaatgagactctggaagtggtatcagtgctgattacagggaaataaaaagaaaaaatcaaatatgcacaaaagaaatggaaaacactaacatactttaatcttagtcttctaggaatagaaagaacatttccaaaattaataacgaacatagtaattcaaattttttaaaataaaaagtttcctccataaatttgaaaagcttaccaggaaagtacaaagatattgagatttatagtttgtttgttgaaatggtttttattaaagtaatcaataccaaaaaactcttgtttgttctaagtaccttggtcagaaacccgaaacatttaataaaagaaattgaacaattttttgacttaatgtttgctaaaaagtagaaatggaaatcatttaattgccagatattaaaaacagaaagttttctattgctgtaatactcactccccatcagtgtaggagaaacaaggttttatatttaactataatatattccttaaaatatacttaagtgggaaacttaacttctgccgacagttacagtggggaaagttaccactgttctctttccctaactaaataccgtacatagctatcatctggaagtaatagtattacttcagtgcattgtgccagtagacacttaatacagaatatactttagactaaatgaaatccagatcccagtaatactgaaacagaaagacacaggttcctttggttaaactaagtcatagtgtacagtgtactataaattaaatacagtttgtgagtatgtcattagattttaattgaatttgcaattagcatcccaaacatttaaaaatcgtgtgggtttataagtttttacttttgaattttaaaataatagaacctttacccccttccactacccatctcccatagcaatcacatccatttatgttcttatcctaatgaatcagctaaattgggttttaatttacaatgagctggtaagagttaaagaaaatgactcctataaatgtagtaggtgagaggctgagggcatcctcttctaggttattctgctccttcctacctttgttgatgccccacagtcaatgttggggaaaattaattaggatttatattccagtcttctctaatgtgttgtcaccattgcacagactcaggacttccagtgcagtgttgactagtaccagtgcacatccttacccaggggactggaacttacccaggatcacaaaaatgacactaggaatgtttctcccctctcagcattcaaatgttctccttatcttttatttttatatatttatttttgagacaagattttgctctgttgcccaggctggagtgcagtggtgtgaacatggctcactgcagccttgacctcctgggctcaagcagtcctcctgccctggcctcctgtgtagctgggaccatgcctggttaatttttaaatttttttttgtagaaacagggccccactgtgttgtccaggctgatcttgaactcctgggctttaccttttattattttaatttaattttattttttgagacagagtgtcgctttgtcacccaggctggagcacagtggtgtgatcttggctcactgcaacctctgtctcccaggttcaatagattctcctgcctcagctcctgagttgctaggattacaggagcatgccaccatgcccagctaatttttgtagttttagtagagatggtttcaccctgttggtcaggctgtgatccaggcaccttggcctcccaaagtgctgagattacaggcatgagccactgtgcccagccttatcttttatttttaatgattattgtttaaagtacactgagttcaggttaaaaaccaactgccaaagtaaattttaacacctaaaagctgggagaaggggccattcttcttttatgcagtaactctttggagtccagatactaacatgccccagatttcatcctggtgctaaactgacttgttttccaattaaaaaaaataaaagtctgagtaatattgcgtaggagtaccagaaatggccttgttggaaaccaaaactatttacattcgttaagaaatctgtttgcaggtgtgtctgccacatttacagcacagtgtacagctcctggcactcaatacacagtgttgcacagcttgccgcaggagcataaagtggaggtagtaaaaaggtaaggaagaaagagggaggaggatgagttgttctctattcatttgcttctcatttcatcactgatttggtggtacccagacctttacagagccggtctccataatactggtgcaggtggcctgatgcccagtttctgttgctcagataatgcagtctcatctcgtctgtgatttcagcagcactcatggcaatgggaacattcttcttctttgcaacccaggagtgagattgaatctctgattaaagagcaaagcttgagtgttttggacatggtaatgctgcagaggtgagttcctgttctggctgtccatgtccaaacaagtgaaacaaatgttttcatactttgcagttgccacgttcattcattcattcattcattcattcattcattcattcattcatttttgagacgagtttcgctcttgttgcccaggctggaatgcaatggcatgatcttggctcactgcaacctctgcctgctggctcaagtgattctcctgcctcagccttccgagtagctgggataacaggtgcacaccaccatgcctggctattttttatatttttagtagagacggggtttcaccatgttgaccaggctggtctcaaactcctgacctcaggtaatctgcccgcctcggcctcccaaagtgctgggattacaggagtgagccaccacacccggtctgcagttgccacatttaacctttagtgctaagtaaacatttcaccatggttcactttgtacaaaatgagaatctttactgaagcatcccagccaaacataagaatgtactttacaattttttttttttttttttttaagcctaaagtccctggaagaggctggcaaactggcttgagaaacacttcactgggcatagagctgctgaagctgctcctagtccgtgtgttgatttcactcctataagttggtggctactctgaaatagttttcaaaatttttattgtaaaataaaaggcagttacaggagaactatacaaaagaaacctatggcttaatgaactattatagggcgaactattttgaaatcatgaaataggtccagacgcagatgtttaccctgaatcctggaaagctgtgtgacccatctcagtgctaacctccggcctctctctaaacatacccattcctttggcttttatagtaatcatttttttttgcgtttaaaaataattttattgtccaaatgtgccaccttggacacaatatttaagtcttgtccatttatttttaaatttgataagtctttaaaatcttagtctgtaggctcctcttgcttccttttcttcatgacttatctgttgaagaacttgggtgtttgacttacagagtcttaccccagtcttgacttagctcactgcatggcgatgctatagctcagtggtttcccccattcttggtgtttcctacaaattggcacttgaattcagagatgggatcagacttggatttgatgcctttgatgaagactataggaggcacataatgtctttttagctctttttaagatataagcagactttgatgcttactgcccatatctagtaatttattggattacaaaattttggtagtttaatgctaacatttttttcattagttaattggaatatatttagaaagaaacccttcttctcatttactgttttattaccactggtacaattcatatatgagaagcaagataaatgcttaattctttacctttatttactatttctgaagtaatgattggttccttatcatccctcgaagttagccaattcttttgaagaaatcactatgaagtcatactgttgaaattactgtgaagtcaagttgttcctctttggtccgtggggcttaagttgactcacgggtctttttgacttgacctcataatcttctctagcttccttactatctgatctgacaggacattccaggctcatgttttacattttctgttccaactctttatttttatttatttatttatttatttttgagacagagtctcactctgtcacccaggctggagtgcagtggcgcaatcttggctcactgcaagctctgcctcccgggttcacactgttctcctgcctcagcctcctgagtaggactgctggagcctgccaccatgcctggctaattttgtttttgtatttttagtatagatggggtttcaccatgttagctagaatggtctcgatttcctgacctcgtgatccacccgccttggcctcccaaagtgctgggattacaggcgtgagccacagtgcctggccttctgttcaactctaatcagccatcttttcaaaatgccttggcttcttctaatggtatttggagatcacagttggggtactaggcatggtcattgctactgattggtcattttaagcctttttagttgcaggctaggaaaaaaaatatacatatatattaacaggtttttaacatatacgttttatgttatatatgtatattgcttataatacaatatgttatcttaactatattatattaataaaatatataccatatggcaatatatttactatataaatatgtttaaatataatgccaaccctaacccaaaatagggtatgtatataaaacaaatttatattataataatcatactgtattaataaaatgcacataacatttttctcatatataatgtatataacaatatagaagtataattaaataaagtctacattttatgtgagacaaaacaactcctgtgttcatagcaatattttccattacaattcaaaattgcagaactttaacctctttgttgcctctgtgtatcttcattcttctggattcagaattctgactctcaaggataggggaaatgacagaattagagtatctcacaattgcttatttgtcttgtcctgtgctatacacagagcaatctcaggataacaatgttaataccactaccaatatgattactaaaaacattaaaaatgtatttgtacataatcttcctgtaatattaaaaaaaaagttgtactatatctatattgtcagaaaatgtggctgttatctataaggttttatatatatatctccttagctttcatttagttttagctctacaagtaaatcccgactctttttgttgatatctcttttgtcattttagtttcctgaagctcattctctagtacaggagtgggcaaaccttttctgtaaggagccagaggggaaatatttttggctttgtaggccctatgatctctgctagtactcattcttattcttatagtgagaaagcaatcacagacagtgtaaactatgagcatggtggctacgtttcagtttcatataatttttatgtgtaatgatacagtatttaaaaaaatttttgcctaacccccacccccaataattagtaaaatcttttcttagatcatggactgtacaaaaacaggcagtgaggctaggtgtggtggctgtcacctgtaatccctgcattttgagaggctgaggtgggcggatcatctgaagtaggagtttgagaccagcctgaccaacatggtgaaaccccgtccctactaaaaatacaaaattagctgggcgtggtggtgcatgcctgtaatcccagctacttgggaggctgaggcaggagaatcgcttgaacccgggagctggaggttgcagtgagctgagattgcaccattgcactccagcctgggcaacaagactgaaactgcgtctcaaaaaaaaaaaaaaaaaaaaaaaaaaaaaaaccaaaagcagggagtgaatgggccagatttggcctacacactagtttgcaaacctctgttgtattggacttctcagagtttatgagttcttgcatgttgttaaattttctctgcctttcatagttgcactgacttctatggatttaaaattcttagcttgactcagcctggtggctcatgcctgcaatcccaacactttgggagactgaggcaggaggatcacttgaggccaggagtttgagaccatcataggcaacatagcaagactccatctctacccaaaaaaaaaaaaaaaaaaaactgggcacagcagtacacatctgtaggcctagctacttgggaggtcaagatgggaggatcacttgagcccaggagtttgaggctgcagtgaactataatggcacccctgcactccaggctgggtaacagagcaagaccctgttccacgaaaagaacataaaattattagctcatactttctttccttgaatttcttactcaaaagagtttattattccattttcttttggtataaaatgttgctgtcaaagtctgatgattatttaaatttctcttttgtataagttacctattcctgtttttttttttttcattttcttttacttaagtaatattgctagaatttttcttggtatgttggtcatcctggaatgaatttctcctgtagtgtggtcttttaatatgtatttttagttcaagtaaattttcttgagttgtatttttaatatttgctcttttttttgctttggttctcttcaaggattcctattattcatatgttggatgttcttttttattttcaatatttctcatcttctgtattatttattcattttttatatttaaattaaatatttttattttcaatttgtctttctcataaggcattgtctgttttccttattcactcttacattctttgtagctgttttcatttctggaatgattttctttttcatttctagttgtatcctgagttctgtcatctcatttctgagcttttctaaatctgatttatactattttatgttatgtgtcacttaaaaatgtcttttaacttgttttgaaatattagatgataggccaggtgcggtggctcacgcttgtaatcccagcactttgggaggccaaggtaggcggatcacgagatcaggagttcgataccagcttggccaacataatgaaactccgtctctactaaaaatacaaaaaaaattagccgggcgtggtggtgcgcgtctgtagtcccagctacttgggaggctgaggcaggagaattgcttgaacctgggaggtggaggttgcagtgagctgaggtcgcgccactgcactccagcctgggtgacagagtgagactccgtctcaaaaaaaaaaaaaaaaagaaatgagatgatagttttgatctattgtattggtatgtttttctcctgtgctttcctgccctacatggatgttactctggtccctttttctttgccttataaaaacattgtattggggccaggcatggtggctcacgcctttaatcccagaactttgggaggccgaggcgggtggatcacttgaggtcaggatttcgagaccagctcggccaacatggtgaaaccctgtctctactaaaaatataaaaccatattagcccggcatggtggggggtgcctgtagtcccagctacttggaggctgaggcaggagaattgcttgaacccaagaggcggagattgcaatgagccaggattgcaccgctgcactccggagtgagacttcgtatcaagacaaaaaacaaaaaaaattatgttggattttaccttgatattttatttcacttagtttaatgtgtaaaattggtttttctctacatttctttttaaagagccatgtattttaaaatcagtgactcatgtccaagaagttcaaacacgagtagagatagcaggaagtggtttattctgaggtcttgaaaagaatgaattaaccctgtaatctccccagtattctttttgatgttcctattgacatcactatattcagtgggtgctcctttctatctgctacattagtttttgaaagctttctttctgactcagtttatctcatgtgctaacttcctgaaccaatcctggaactggccttttctaccagaaacactcttttcttttatcatggaatagtattaaaaaccacaatctggatcttttggacagttcagctgtttttccgtggcttttttttttttttcgagacagggtcttgctctgtcatccaggctggagtgcagcggtgcagtctcggctcactgcagcctctacccgctgggctcaagcaatcctcctacctcagcttcctgagtagctgggaccacatgggaccacaggtatacaccaccatgcctggctaatttttatattttttgtagagaaaagtttttgccatgttgctcagcctggtttcaaactcctgagctcgtgcagctcacctgcctcggcctcccaaagtgctgagattacaggcgtgacccactgtgcccagccccatggctgtctttttcttctgaccctggttttgtagttatccaagtagcaactcttggtaagcctaaaatctatacgctttaaaatctgaattcataatatagcaatttactaacttgtggtatttctaagaatgaaatatgtatcatacattttaatttttacaatgattctttctgtccttcattcctgacataaagcctatggtaaattaaatctcatttccttaacatactgctcaaacccaaccctttcccccattcttctattaaaatttgtccagaaccatagagtcacagaatttaggaaatgagtagaattttggagcagtgatttcagcttttcataatttctttctcttcttttgtcttgctgtgttgcccatgctgaagtgtagtggctagtcataggtgccatcatagcgcacaacagctttgaacagtatctgggctcaagagatactcctggctcagccttccaagtacctgggactacaggcacacttggctcataattttttttttttaaatgaatcactttaatgatgaaaaatgcccactttttgtgatcataagacatttacttgtattcagatattatatgtatcatgcaaggtaaatttaaaaggaccttaaaaagcatatttttggaaacaaatttagttgctattgcataacaaaaaacttacagtgattaagggaaactgataattagatggataacaaaaaataccgggttaacagaagagtatcgaaggttactagtggataaaatctggccttttattctaagtcacaccgctgcctggtcaagaactgaaaacatttgaaacatgctccatcacactgcagttaccatactctcttatcctgacctcatcctttttggttacagatttatgggagccaagagcctctaatgttgctttctcattttgctttaattacttttaaaggccaatctagggagcacttccaaaacacattgataaaaaggaagttaagtctttgaaacatttgtagttatccagcatactactggctatttttcttttgtattgggtgggacaaaaaatagtcactaaatacttgatataagcttttttttttttttttttgacaattttacatttttgggtgagtaattttcctcaaattagaatgcacaagaaaaatctggttaatcagtgttccaggtcgttgggctcctgttaatcagaagttttactgtataatcataatgtattttggatgttctcatttatgttatttcttcaattctttgtgtgggtactctgattgcttgattacatctgcctggcatagtcgtttttaaagcagcatttataataaaattttccatctttgcaagtaaaatgagaatatggaaagacaattgatggttgaagcatgattgtttcctcttgtctttacttagtgtttagtgggtttcaggttttggataaagagaaatgaatatgattattgtcctggtccgaaatgattcatgtatccacctggagacgtagagttgatagaggtgtaggcttacctctattatctcctcatacagagcagcgctacttcctacgtatgtgctttacatttttggggatttgcataagattttttttttccatgaaaataaggttctactaaaaccaaatacagaaacatttgatagagagatactttataagcacctcttagggctgaaagggtttcttgtctagcatcctgccacttgtaacaccagcaaattctaggcatttgggttcctataatattattttagagtcctgtggacctagctatcttattattctagtgtcctcttttttttctggagacagagtctcactctgttgcccaggctggagtgcagtggtgcaatcttggctcactgcaaactctacctcccaggttcaagcaattctcctgcctcaacctccagagtagttgggattacaggcgtgcaccaccatgcctagctgatttttgtatttttagtagaggccactatgttggtcaggctggtctcaaactcctgacctcaggtgatctgcctgccttggcctcccaaagtgctgggattacaggtgtgagccactgtgcccggccattctaatgtcttctttttatcaagacttctggagagtggacaaaaactaacagttgtggcactcaacttggtgctttatattattattgatggggtttaggacatgctactcccaaatttggcaccttggcatataagctgaaggatttggagaaaacagcagaagcacgaaggtctctgaccttccccttcctctcttccctgaagcaggtcctaagacctaggagggactttctgaccttctctgaaccagatcctaagaccttcatgtgagagatgcccttcctgtatctggaagagaggagcatcctcatccccatagagaaaaggacgcagagtaatctgagtagtttcccccagtttatgatacttacctcttgctctccgtgctatcatttctccataactcaccagtcctcatcaaccctgtataaaaacactcaagtttaactgtttctttggattttcatttccttatgcaggctccggtgtcacgtacaacttacaattaagtaaatgtgtatgcttgtttttttggtaaactatcttttgtaataggtgccctagccataaacttagaagggtagaaggaaaataatagttttcctcctgtacattattttatttaattctttaatcaaacttaaaagtcagatattatccacattgtcactcaaagaaatgggtgctttagactcagggtctaaaatttcccttttcttttgttttgcttttgggtaggagagaagcatacctcttgaatttaaagacattggcttttctactcattttctctgaatgatttcattcacaacttttatttttgtatttatttttttgagatggagtctcgctctgtcgccaggctggagtgtagtggctccatctcggctcactgcaacctctgactcctgggttcaagcagttctcccacctcagcctcccaagtagctgggattacaggcgcatgccaccacgcccagctaatttttggtagttttagtagagacgggctttcactgtgttggtcaggatggtctcgatctcctgacctcaagatctgccctcctcggcctcccaaagtgctgggagtacaggtatgagccaccacacccggactgccattcacagcttttaattccgtcctgtatttgatgcctttaaaaatctgtattttggccaggcgtggtggctcatgcctgtaatcctagcactttgggaggcggaggctggtggatcatgagattaagaggtcgagatcatcctggccaatatggtgaaaccccatctctactaaaaatacaaaaattagctgggcgtggtggcgcgctcctgtagtcccagctactcgggaggctgaggcaggagaatcgcttgaacccgggagacggaggttgcagtgagccaagattgtgccattgcactccagcctggtgacagagtgagactctgtctcaaaaaagaaaaaatctgtgtttcagcctggacttgtctaataacccctatacctctatatctgcctcctgaacatgaatacttgactattgcagaggcctgtcagctcagcgtgtgcaaagttggagtcatcatctcgcctcttaaatatttatctccttgtatattctttgtgtttattccttgttctacttctacttcctgctcggggtgggtttaatcctcttggtcatgatggccaggagagcagtccaagcaacaggctactcagctgccctggtcaccaggagaatgaaccttttttcccaagtcaagattctttgcaggcagcaacgctaacatggaatgaacaggtgatgtaaaagtgatatacaaatatgcagtttattgtttataccaactctgacaaggtcgtaggacaatcagcagttaggcgccttcctcgaggaaggcctgcatataggtctggtttttcccattttatatttaccttcagttctttatgtaatgacttcatcctttatctcagcaaatacccccattacttttctagaccatgccctgtggtggagctaatggcatcatattttgttctgtctctagatctatttaagtcactagcttttttttttaaattagagtggcataaacaagagaggtagatccattgtcaaggtattcagtgtggtttgtgcagagtggttttgattgaaactgaactctacccagttaaattcccactggatttttgactcatcttttatagtcacaggatgcaaacatgtactttcttttgtctatttctctgaggtgtcagtgatctgttcacgtttcctggaaattgttgatatcctgttgtcttcatccatgttatctcctgtgtttagctcagagcctggcacagaattggtattcaggaaatatggatatttgtgttatactaggcattatgctgcaggctattgagaacacagagatttataaggtgtttacgggtgaccttactggctagattaggtggtgtaggacgttatatacaaatacagtgtcatagagtgacttttccgaggcacactgtttacccagaaggagttcttcagtgcttttggttgttttcatttgactttgttgcatgcatctatccacacatgtactatatgcaatatagtattttaatgtgttggctcaaaaactgttgtttctgcaataaaaataattagaaaatacacatatgggcttttcttttataaaattgtgactccacatcatgctccgtaatgttcttgttataaattttgacttgtttttctccacaggcagcagaagatgtcgttttcattggacctgacacacatgctattcaagccatgggcgacaagattgaaagcaaattattagctaagaaagcagaggttaatacaatccctggctttgatggagtagtcaaggtgagaagctactttaacttttattgtatatgtcttcaagttaaacattttgtcaaaagtataagataaaatgtaactattgcttttttgggatatacacacacacacacacatatgcacgcacatacatacatgtatatatgtttaaaaaatcagtgtttttacatttatttatttatttatttgagatggagtcttgctcttgtcgcccaggctggagtgcaatgatgcaatctcggttcactgcaacctctgcctcctgggttcaagcgattctcctgcctcagcctcccgagtagctgggattgcaggtgcctgccaccatgcccagctaatttttgtatttttagtagagacagggtttcaccatgttggccaggctggtctcgaactcctgaccccaggtgatctgcctgcttcatcctcccaaggtgctgggattacaggcgtgagtcactgcatccggccagaaatcagtgtttttaactggattattttattatttttagagatggaggtctcactctgttgcccaggctggagtgcagtggtgcagtcatagctcactgtaaccttgaactcttaggctcaaatgatcctctcgccatgactcaagaatccctccttctttagcctcccaagtagctaggactgcagacacacaccaccacacctgactaattatttttattttgtagagatgagggtctcaccgtgttgcccaggctggtctcaaactcctgggctgaagtgattctcccgccttggccttcccaagtgttgggattacagatgtgaaccattgtgcctggccaacttggattgttttaaatagcataagttaaaaagagtgagaaactgtttgagcattgtatttaatgaatcagcagtgactcagactttcataggaaaaaatttggtgattaaaaaatgtactgtcagatctctggactgcatttaatagtggtatgtgtttcatgtgttaaacattaagagtttctctgtatatctttatcttgagcttctctccatgtgcataatatgtaagttaggatcatgtttctggtgaaagtggtatagctataggtaattgtatattgcaaacatttagcaagggccttctgcagctgaaggcttctgagggagaaatgcagaaattgaagtatgcaacttctccttttcccatgagaaattattctgtttttttctagttagaagagagtcctcatgtagagttttaaccttgcgatttgacttagcctgcaggaactcttcatttcagcatttcgtattgttacttttggcattctgtgttgggttgttcttcattgtgcaagatcatttcatgcattagaggacgattagaaaacttgccccctagttaataaatatcctcagcttcttgcccatatttacctgcatttacttttatctatgtgtatccatgttgtttcttcccacttgttacaaggaagaggtgttccacatcctctggaaagccagttcctcctcctacgctccaaatgtattctttatagccttcacaggctatggttttactgattatcttttctctcttctgtgtcttaaaattctcctcatcttttagctccttttgttatcattgctattaaaaatgctcagtgaacaaatgtgttggtcactcagttatgtgggaaggatgtggtgatgagatacacatgatctgcgtatcatagttctcacagtttagtgggaaagaaacaaacatttcttccattcgtaaagcaccatcacccctatcactctacagctagttgccaccttctttctctcttcccctttcagtgccaaagctcttagaattgtccttcctcactttcatttctgtatctttcacttaatcttttcttgccgtctagcttctttcctcattcctactgaatttctcttgcaaagctaccagcaacctcttccctttgttaaatcaatatgtaattttgaattctgatcttatatcaatctttgagcaacatttgagtctcttggtcagtccatacttctctcatgagatactcacttttggcacattactcagttctagtttttgtgttttttggcttttttgaatgccattcttagattccttcccgattgttcttcctatctttgttccttaaatgggggttttattctgggtcctgagtaggacatttcctctttttattgtgctaacttgccctgggcaatcttactttttttcatggcgtcaattgccaccttttcttttttcttttactattattattattttttgagacaaggtcttgttctatcacccaggctagagtgcagtggcatagtcatggctcactgcaacgtcaacctcgtgggctcaagtgctcctcccacgtcagcttcttgaataggtgagactataggtgtgtgccaccacagctgcctacttttttatattttgtagagacgggggtctcactattttgcctagactggtctcaaattcctgggctcaagcagtccttcccctcggcctcccaaagtgctgggattacaggcatgagccactacacttggcctattgccacttttctgaccaatctcaaatgtatgtatctgttctgaacttcaggattacatatccagttgcttcttatatagctctcactacttgatgcctctgaggcaccttgaaactaacaattaaaagctgaactcatctttctcctgaaactagagattggtactatagcccatgcacacctatttttataaataaaggtttattggagggcaaccatgttcatccctttacatattgtctgtggttgcttttccactacagtggtagagctgagtagtagactcaatatgtggagtagactcaactacatgggacacatagtagactatgtgactcacaaagcctaaaatatttacttcctgatccattaagaaaaagtttgcctatccctgctctaaaattcttatccttcattcttttccgcctaggaaggtggtggctagaaacatagagtaattcttaacaaatgcgactgtggagaattcactcagatagctttctaatccatttacttctttctttgcccgtactaaccaaccccagattccagctactatcatctagtctggattacttcatctgccttctaattagtctccttgtagtcattcttgcttccatccaattaattttttaaaaattcttcacctcaagtatttataatgtctttgtgttacaaacagtctaatatacttttagttatttaaaaatgtacaataaattattgttgactgtaatcactttgttgtgctgtcgaatactagatcttacccattctatctaactggacccatttttgtacccattaaccatccccacatcacccacccccactcctccccactacccttcccagcctctggcaatcatcattctactctctatcactgtgagttcaactatgttaatttttagctcccacagatgagtgagaacatgtcaaatttgtctttctatgtctgacttagttcatttaacataatgtcctccagttccatctatgttgttgcaagtgacaggacctcattctttttggtggctgaatagtactccattgtatatatgtaccacattttaaaaatccattcgtctgttgatggacatttaggttgcttccaaatgttggctattgtggatagtgttgtggtaaacatggtagtgtagatatctctttgatagactgctttcctttcttttgggtatatacctagcagtgggattgctggatcatatggcagctctatttttagtgttttgaggaacctctatactgttctccacagtggctttactaatttgcattccccccaacactatacaagagttcccttttctctatatcctcgccagcatttgttattgcctgtcttttggataaaagccaatttaactggggtgagatgatctctcattgtattgcatttctctgatgatcagtgatgttgagcacctttttatatgcctgtttaacatttgtatgtcttcttttgagaaatgtctattcagatcttttgcccatttaaaaaattggattattagattttttttcttgttgagttgtttgagctccttatatattctggttattaatctcttgtcagatggatagtttgcaaatattttgctcccattccatgagttgtctcttgactgttgatttccttggctgtgtggaagctttttaacttgatgtgaccccatttatttatttttgctttgcttgcctgggcttgtggggaattactcaagaaatttttgcccagaccagcatcttacagagtttttgcaatgttttcttttggtagtttcataatttgaggttttaggtttaaattttcaatccattttgatttgatttttgtatatggcaagagataagggtctagttttgttcttctgcatctggttatccggttctccgagcaccatttattgaagagaccgtcctttccctaaggtatattcttggcacctttgtcaagtgaattcactatagatatatggatttatttctgggttctctattctgttctattggtctatgccagtactatgctgttttgattgctatagctctgtagtataattttaagtcaagtagtgtgattcctccagttttgttcattttcctcaggatagctttgcctatcctgggtcttttgtggttctatataaattttaggatttttttttctatttctgtgaagattgtcattggtattttgataaggattatattgaatcggtagattgctttaggtagtatggacattttaacaatattgattcttccaacccatgaatgtagaatctctttgcatcttttgtgtccttttcaatttctcgcatcaacgttttatagttgtttttttgtgtgtgtgtgtgtgtgtttttttttttagatggaacctcgctctgttgccaggctggagtgcagtggtgcaatctcggctcactgcaacctctgcctcccgggttcaagcgattctcctgcctccggctccctggtatctgggactataggcatgcaccaccacgcccaactaatttttgctttgtttttagtagagacggggttttaccatgttggccatgatggtcttgatctcctgaccttgtgatccacccacctctgcctcccaaagtgctgggattacaggcatgagccactgaacctggcctatagttttcattgtagagacctttcacttctttggttaagtttattcctaggtattttattttattttattttattcatagctattgtaaatgggattattttcttgatatcgtcttcactgttggcatataggaattcccatccattaattaatgatacttcagtttgagtgaccaaaaatccagatttgatcgtatgcctatctttaataacttttgaatgactactcatataaatgttttaaatggttggattttgcttagctctccaaactgatactgtgccagtctatcctttgcattgtatgtatccgccatacttgacatcgttcagattcttgaaacttatgtgcttagtcatatctgcttctgtcttcattcctgattgtctcttagtcattgtttaggtcttggcttaaatgtaaattcctcacataggcattccttaactgtcttcattagattaggctctctgctgtatttttccttaggaccctacacttaactcatcacattttaaatcatttattcattcatctattcagtagatatttaccaagtgcacgcaatttgtctgacactgtttgaagtgctgttgatatagtagtgaacaaaagagactgaacatatttttatgccctcaaggagcttacactatagaaggaaacagatgataaataataaaacatatgttctatgttgaaacataagagaaaaagactgctggaaggtggggctatattcacaattttatatacaggcatgtcttcatatctacaagggattggttccaagacctaccccctcagataccaaaatttgttgatgctcaagtgccttatatgaaatggggtagtgtttgcatatatcctacgctcatccttctgtatactttattttattttttatttttatatatttatttttttgaggtggagtctcactttattgcccaggctagagtgcagtgtcatgatctcggctcactgtaacctccgtccaccctgggttcaagcaattctcccacctcagcctctcaagtagctgggattacaggcatgcaccaccatgcccagctgttttttgtatttttagtagagatgaagtttcaccacgttggccaggctggtcttgaactcctgacctcaagtgattcacctgccttggcctcccaagtgctgggattgcaggtgtgagccactgtgcgcagccctgccgtatactttaaatcatctctagattacttataataccctaaaacaatgtaaatgctatgtaaatagttgtcccactgtgttttaaaatatgcagtattttaattttcctccctttcccttccccttcccctccccttccccttcccctctccttcccctttcccttccccttcccttttttgggtttaatccatggatacagaacccaaggatatagagggccaagtgcatgtttagcagaccatctaaggaagtggcaggacaagtcatgttgctatcctggagaagagcaaagcatattaggcagaaagaataacaagcgcaagattgttggttgaggttgaagtgtacctgctactgaataaacaccgaggaagcatgtgattggaatcatcgagagagacaatttagagataaggtaaaaaaagataatggtgtagtagggagcttagatttttagggccttacaggccatttcagtattaggtaaatgtctccttcctacacggagcgtaagcttctgatggcagggatgctgctctctttattactgtatcacatgcacatggtgcctgacatattgtcagtgcttaagtcaatgctcagtcagtgctcactaggtatttgttgaatgaataatattctaggagataaattttatacatatactcattttatatacgttgccatttagtacatattgtttagtcacatctattagaggcaccaaaagaaaccaaaaaccaagagaaaaaattaaaagacaatagaaacatatccacatatgcttcagatattggaattggctgagataactacgatttatatgctaaagaaatccaaggaaaatatggagaaaatagataagtatataaagaatttcatccgggtatggtggctcatgcctgtaatcccagcactttgggaggccgaggtgggcggatcacctgaggtcaggagttcaagatcagcctgatcaacatggcgaaaccccgtctctactgaaaatacaaaaaatatttgagtgttgtggcaggtgcctgtaatcccagctactcgggaggctgaggcctgagaatcccttgaacctgggaggtggaggttgcagtgagccgagatcacgccattgcactccagcctgggcaacaagagcggaactctgtctaaaaaaaacaagaatttcacaagagaatttgaatctattttaaaaattaaatacaagactgggtgcagtggcttacgcctgtaatcccagcactttgggaggccgaggtgggtggatcatgaggtcaggagttcgagaccagcctggccagcatgatgaaaccccgtctctactaaaaatagaaaaattagctgggcgtggtggtgcgcacctgtaatcccagccactcgggaggctgagtaggagaatcgctggaccacaggaggtggagcttgcagtgagccgagatcatgccactgcaccccagcctgggtgacagagcgagactccatctcaaaaaaaaaaaaattaaatagaaattctgtaactgcaaatatatgaaaataaggactttagatagacttaacattggactcaaccaagcaaaatatagtatccatgttatagcatgtatcagtttttgtgtgtgtgtgtgtgtggctgagtgatattcagttgtatgaatatgcttcttaaaaaaatccacctgaggtcaggagttcaagaccagcctggccaacatggtgaaaccctgtctctactaaaaatacaaaaaaattagttgggcgtggtggcaggcacctgtaatgtcagctacttgggaggctgaggcaggagaatcgctagaaccctgggggcggaggttttttgtgtgtgtgtggctgagtgatattcaattgtatgaatataccacttaaaaaaatccatctgaggtcaggagttcaagaccagcctggccagcatggtgaaatcccgactctactaaaaatagaaaaaaataagctgggcgtggtggcaggccctgtaatgtcagctactcgggaggctgaggcaggagaatcactagaaccctgggggaggaggttgcagtgagctgagatggcaccactgcactccagcctgggcaacagagtaagactctgtctaaaaaaaaaaaaaaatccattcattagttgaaagacatttgggttacattttgaccattgcaattagtattgctacaaatatttgtatgcaagtatttgcttatatatttgtttgttttgagatggtatttcactcttgttgcccaggctggagtgcagtggcgtgatcttgactcactgcaacctctgctgagttcaagtgattctcctgcctcagtctcccaagtagctgggattacaggcacccaccaccatgtctggctatgggttgtttttttttttttttgtatttagcagagacgggttttcaccatgttagactggtcttgaactcctgacctcaggttatccacccgccttggcctcccaaagtgctgggattacaggcgcgtgccactgcgcccagccatatgtctgttttttaagttatttggggtatgtacccaagagtggaattcctgggtcatgtggtaattctttgttcagctttttgaggaactgtcaggcatccaaacctttatgtactcccttcctcttgtataatccactcctcttcaatttgggtagaacctgtgaattgcttctctaactaatagaatatggcaaaggtgatgtgatattactcccttaattaggttgcattatatggcaaaagtgatgggatgtcactgcattcaattacattatgtggcaaagtggttgggtgtcactcttgtgattatgtttcattatatagtacttgatcttaacagactagagaacaagattctttttgctggcttgataaagtaagcagccatattaaggaagcctacttggcagtgaatggtgggcagattctaaggatctatgtaaggacagtctctacccaagagctagcaaaaggctggggtccttcatcatgcagctacaaggacataattctgccaactacctgaaagagcttggcagcaaatttctccccatttgagtctccagtgacaatgcagcctggttcactccctgattgcagccttgcaaacccctgagcagtgtatgatgaaattattattattatttccttatgaggtcttgtcctctttacctttttgttttagacatttgtgtgaatttgggtaggggtttggatgtgtcattatgaaccttgatctactcagcctgaatatttctaccagtataattatatatttttttgatgaggaatgttgcctttttgatatcttcaatttggacttgatttattcccaagaatactgatgtgtcactgtccaaattatttctggcttgatgatgaatggtggagtcctcaagggttcaaggaagagaccatcaggagagtgtttgatctggaaattctgtttacacgggagatttttccttatgaaattagtgaatgtagtgtctcctaggaagggaatgtttcttggctaaaggtccaaaggtgaccgttgtgtgctgggacatgggaaatgtgacgggtattatccatatctgtcaactgagtagtttgttgattccgagggagagcttgtggaacaatggcaggaattaaggtaaatatactgccacccatatcaataaaatttttacttgtttctccgctaataattagtgaaaattcgtcttgtgagttgaagagtaaaaggagaaatgggtacttgatttgctgttagaacatttgcctactatcattttttcccaattctcttgaataaaacagaacaattatttttccattgtaatttcttcttacaatctctgcaggtttctttatcaaaagactggtgtttaatttttggagtgggagcatctagttttatcttcaagggtatcatcttattctgggtcttatactgcctttgttttcaggctcttttgaaatgtgtaatatggagttacattgtttgacaatgtggtgccttcccagccagtttttgcttgtttataacattttctttttctggcttaaggctgttcacaagaagtgaggaaggagctggggtcacaactacttgagggcttactcctgaatgctaactgaaggtagtaagagcccaccctggaagtctgcaaggggcttatccttcgtctgctagaacaactgaattagagttacctgttttcacaggaaagattttggtaatagccttcaaaagaccgtgtccaatatttacagtttcttttttttgtttttgttttttttgagacaagagtctctttctgtcacccaggctggagtgcagtggcgcaatcttggctaactgcaacctccacctcccgggttgaagcagttctcctgcctcagcctcccaagtagctgggaccacatgtctgagccaccatgcctgactaatttttttttttttttttttggtatttctagtagagactgggtttcaccatgttggccgggtcttgaactccttacttcaagtgatccacctgcctcggcctcccaaagtgttgggattacaggcatgtgccaccgcgccccgtcattcacagtttttctaaaccccactggctttctgtgcatttggggtctgaagtcactctcaggatatttgtttcccctttctaataggtcttcctatttccctctccttgctccccactttgtaactatccttggtgaaatgatgccatttataaagagaagaccatgaatttgcattacatatttaatgcatttaaagaaacagaagtctgactctgagagaccacagacttagtctgagccaaactcatgggagtctcctaatggcatattgaatatgttgtttgtgcacctcctgtcttgggctcacagcctaatggttggccatctctaactgcaaacctgacagtgccttgttggtttaagatttggagagactgtctctcctaggcccagacttccatggacaaagcaagtcaagacagaggaaaatactcaaggttcccaggtaaattgtgttctatttggatgatgatctgatgaaaccttctgaactcactggcttctagagtcagcatgaaaatgggcttatgaaacctatgcctgtcttctttcaggtgaactttgacttatggacttagaataaaaaatgttgaggacagtatattagtaatatgggaggtttcttccaatattaaacattttcaaatgtgataagaaattcagtgggtctttattcctacagttgttgaaaaggaaattggacctctacccagtgtgactcatctcaccattgtggttggggagacccctgagggggtcgctcagtgggcctcagagaagcatgcagatgccagatctaagatcttgaactgtggcttttagtgggcttcgaacatgtgtctgtgggtaatacacttggttttgcttgttcaacaggttattttggttatcttcttaggaggctgcatctgaatttgcagcctctgttctagtaaatttggaaaatatggaaaggtagacaggagaaaagaaatctcatcttttcagtttttttccttgtatgcattagatgatttgtaacatcctattacactctcaaatgattgattctcattatctgcactaacgactatttctgaatttgtgacgccacagctgaacctgcaggttatagtttccagataagcatttacaaataatttttaaggaatgtccttttgtttccctgggaaatttttttttttttttttttttgagacggagtctcaccctggagtgcagtggtgcgatctcagctcactgcaacctctgcatcccgggttcaagcaattctcctgcctcagcctcccgagtaattgggattacagacatgaaccaccatgtccagctaattttgcatttttagtagagacagggtttcgccatattggccaggctggtctcaaactcctgacctcaagtgatccacctgccttggctccccaaagtgctaggattataggtgtccaggtgtgagccactgcgcctggtggaaataattttttttgagacagagtctcactctgttgcccagactggagtacagtggcacaatctggactcactccatccccgccccctgggttcaagcgattctcctgcctcagcctccggagtagctgggattacagatatgcgccaccatgcctggctaatttttgtatttttagtaattagtaattttttagtaatttttgtatttttagtagagatgaggtttcaccatgttggccaggctggttttgaactcctgagcttgggtgatccgccctcctcagcctcccaaagtgttgggattagaggtgtgagccaccgtgcctgactggaaataatttttaatactagttttatttttagtttgtttttatttctgatacaagaggctgtacatatttttcttttaaatttggctattaatttaggtttctggtatagtgactccacattcacttggagctacaccattcacatttactagtttagatatattgagtataagattacttttgagagtatctatgcagatagaagtttgctgatggaaataaatagtaccgaattttggaatatcttgggtttttagcaacagtttttcattggcagagtgcatatgccaattacaggtaattctgtcttttaaaaaatgtttagtgttctttaaaattagtctacagtgtttttaagactaaagtcttttccttgataactatattctattttttttccccaagtagtttccaccagttatgatacaattttagtttgttacatttctccttcaaacatttgttcctttcttatttgaatatgtaggatgttacatggagacagtttacccatacccctttaaagcattgtgtgcagtacttcagtggtcttctgcaactcttctttttaatggcttattaatctgtccttgaatcatccttttccttagagagaaactaatgttttaaaatgtaattatcaagtaatcgtttggtatcaagtatttgcctttaacaaatttaattttattcaacatttcattaccttgatctcaggaactggagagcagagtgaaaggcatgcacattaagatattggagacaggaattgggatcacagcttttttttttttaaatcaatgaataacatgccacagatcctgctttcaaagagcttaaagccttctgtgtccggaattggtgggttcttggtctcactgacttcaagaatgaagccgcggaccctcgcggtgagtgttacagctcttaaggtggcgcgtctggagtttgttccttctgatgttgggatgtgttcggagtttcttccttctggtgggttcgtggtcttgctggctcaggagtgaagctgcagacctttgcagtgagcattacagctcttaaggtggcacgtctggagttgttcgttcctcccggtgggcttgtggtctcgctggcttcagcagtgaagctccagaccttcgcggtgagcgttatagctcataaaggcagagtggacccaaagagtgagcagcagcaagatttattgcaaagaactaaagaacaaagcttccacagtgtggaaggggacccgagcgtgttgccactgctggctcgggcagcctgcttttattctcttatccggccccacccacatcctgctgattggtagagcctggtggtctgttttgacagggcactgattggtgcgtttataatccctgagctagacacaaaggttctccacatccccaccagattagctagatacagagtgtcaacacaaaggttctccaagtccccaccagagtagctagatacagagtgtcgattggtgcattcacaaaccctgagctagacacagggtgctgattggtgtatttacaatccctgagctagacataaaggttctccatgtcctcaccagactcaggagcccagctggcttcacccagtggatcccgcaccggggctgcaggtggagctgcctgccagtcccgcgccgtgcgcccgcactcctcagcccttgggtggtcgatgggactgggcaccgtggagcagggggcggcgcacatcagggaggctctggccccacaggagcccagggagggggtgggaggctcaggcatggcgggctgcaggtcccgagccctgcccggcgggaaggcagctaaggctgggcgagaaatcgagcgcagtgctggtgggctggcactgctgggtaacccagtacaccctctgcagctgctggccagggtgctaagtccctcattgcccggggccggcagggccagccggctgctccgagtgcggggcctgccaagcccacgcccacccggaactccagctggcccgcaagcgcagctagcagccctggttcccgctggcgcctctccctccacacctccgtggaagctgagggagctggctctggccttggccagcccagaaaggggctcccacagtgcaggggtgggctgatcaggtccctcaagtgctgccaaagtgggagcgccaagagcgagcgagggctgtgaggactgccagcacgctgtcacctctcacttcttcaggaggactgcaagtattcaggcaattgactacattttgataatgctaagctcaaggcgcaggggcctatgcatataggatgggcatgtaacctagttttaggtatcattgcagattttccaatggaaatgatagctaagtgaaacctcaagtctgagtggtagtgagttagctgaaaagtgagattgatgatggacacagctctaatgtcagtgaaaacatcttattgcaaaagcctggaggtgagagacagtgagaactctggaaaactgcagatttgtagtatgaggggctgcagttagaaagggagctagagagaaaattaggatccagatatgtatgggctggaatgtgatgtaacttattttgaaggctattcttgtggtttggggagcctctgaataatttcatgcagaagagttaacatgacagaattgtggcattagaaaactcattttggtttgttgtgtggaaagtaaattggagcatggcaaaacttgaagttggtagacaaattaggatcctcttctaatccaggatagaaacggtagacccctaaaataaagtattgtatgcaacaaagtagatggtgttgagaaagatagtggaagtggaatccatgggattatgtgatctgttcaatgtcaggtgtgaagtggagggaaggatcattgatgattattttactgcatttggttgtaatacctattaacacaccagtttcagaagaaatttatttaatgtcctttagttctaattgttcgttaagaggaaatagtaatacccgtttacaccacagaacagagtatggccgtgtatttgaatgagttttgtaaattaggcagtgtagatttaaagtagtaattgtttttatcacctaattggccagactttaaaaactgtactcttgctttagcagaaggaggcaaataactaagaaagctagtgtgaaggaaatcatttaaaaaagaccctaaaaacaaaaaccaaaaaattggagacaagctgtgtctcagcaattagaaagtataacattaaacattagtgtatttgtccctgctaaaccaagaataatcagttttcctgatgaagcctcaaaggttttatattttggaaaaaaagactcaattatttttactatgctgtttttacaatgatagaaaagtgtactaaattttagaaagcttttttttttctttgagacgaagagtgtcgctcagtcacccaggctggagtgcagtggcgcgatcttggctcactgaaaagcaccaccttccggtttcaagtgattcttgtgcctcagcctctcaagtagctgagtttacaggtgtgggctgccacacctggctaacttttgtgtttttagtagagatagggttttgccatgttgcccaggcttgtctggaactcctggtctcaagtgatccaccttcacgacctcccaaagtgctggaattgcaggcatgagccactgtgcccggccgaaagatttggaagtatattaaaacagaaagaatcttctgcctgactttgagttaactggattatgtggaagctagaaagccattcctgagcccaggattgtttaaaagtttctgctttactttatatatgaatgcagaatagtttgaggacagcttttagggtacagatataactcttacctgtagtgtcttgaaacaaattattatttttttttaataaacagtcactgattcccttctagaaccagctgtaaactcctaagtggctttcatatgaatgggtagcaggattctcatccacagaatagaaaattaaggattggtaagtaggcagtagcaagtgagaaggatgtctgaatcatgaatggtggtcggcgttgacactaataccactatcaaaatgtatgggtgtttagcatctgggaagaatgattcgaatgtgcctgtctttgttgtagtgttttctgcgcttccttgtgttttgccctgttcaccagcaataccgagttcgtagatcgtctgatccagtgcattataagagaggaagtacatgttttttccagtattgtagcgccagggttagttctatgttatctaggttcagaagatgagtaatgacacaggatataacaagtaaggccaggcagggaaggtaccaacatggtagtttggggtggcgggctgcccattttctcataattactaaccttaattgagtacctactgtgggccaggtgctgttctaatgtgtttcagccttgactaatttcatcttcttaataaccctatgagatagatactgttattatgtccattttacagatgaggaaaccgaataccagagaggcactctagtaactcagtcacagtcacagaagcagtattggagcccaagccttctggcatagcgcctgtgttctttttttctttgagacgaagtcttgctctgtcgcccatactggagtgcagtggcactatcttggctcactgcaacctccgcctcctgagtagctgggattgcaggcatgcgccaccacgcccggctaatttttttgttttttttttggtagagacggggtttcaccatattggccaggctggtcttgaattcctgacctcaggtgatccgcctgcctctgcctcccaaagtgctgggattacaggcaggagccgttgtgcccagcccacacctgagctcttaactgcaaggcttggttaccccacaggccatgttctaggtattaacaaataaatgacatttgcagaaaaggcaccagatttttgttaactcttttcacgttttttctggttagtttttactaccatttagttagtttttgtagcatcatccaccactcccatcatattcacagttaaatagtactttttactgttactattcttgggttgggtgatagagcccacttaatgtgagttgttttgtaatagaggaataagaggaataaaagaaatgggtactggtttgcttggtttctttcccttttctccgtttcttaagctactcttttggcattgtattcttagtactttcctgtaactctttccccatcggtgctcaaaagagttaaatagcttcagaacctgagtgtgccttccctcaggacaagctgggattacagaaagaatggaccaccaggtagtttatcacttagaagaatagaataaaatgatatcattggactcttttttccctacctcctgattggaaaccatcaggaataccatcatctgagcattgttgctgacacatttttaatttttttgtgtactttttgttttctcaattgtattacttgtgatatgaaaataaaactattctaaagacttcaaatgaaaaatttttaagggaaaatgaatagcatcaaatttgttttaacaattctgctgaaatttttatatttgactttttcttttttttttccagacagggtcttgctctttcacccaggctggagtgcagtggtgccatctcggctcactgcaacttctgcctcccgggttcaatcaattcccctgcctcagcccccggagtagctgggattaaaggcgcatgccaccacgcccagctgatttttgtatttttagtaaatatgggatttcaccatgtcggccaggctggtctcgaactcctgacctcagatgatccgcctgcctcagcctcccagagtgctgggattacaggcgtgagccaccatgcctggcatatttgacttttcttccactttggggaggattattatgtaatgtgtcagaaattttcttttaataaattataggatattattgaacattatgttaacagagtttattgttctaagccctttcatattttcatgtattgtgtgtcatgtaatcatagatgtgagagctgtcttaagaatattttaaagagtgttaagaataatcagctccactttttcttcaaatattgccaagctgtatttgtgaagagataatgttgttttgtttaaaatatatttattttatataaataaagaacaaaggctgggcgcggtggctcactcctgtaatcctagcactttgggaggctgaggtgggaggatcacttgaggtcaggagttcgaaaccagcctgccaagatggtgaaaccccatctctactaaaaatacaaaaaaaattagtcatacgtggtggtgtgtgcctataatcccagctacttgggaggctgaggcaggagaatcgtttgaacctgggaggtggaggttgcaatgagcggggatcgctccattgcactccagcctgggtaacacagtgagactctttctcaaaaaaaaaaaaaaaaaagcacaaagtatatttagtaaaataaagtttaaccttttacatttttatgaaataaagtttgatatctatacattgaaatgagctgctttcttttgttttgtattataacttaaacttgtggcttttcaatttgaaaacttattgccatgtagaatttgattttttttttttcctaatgcaacactttacttaaaaattatggagtagaactatattttttagaagagcaggttttacaaaacctaaaattcaaactctggaagttgcatgatgtggtggaagaagtgctggactgagaatcccaaaaatattgggcttggttttgcccaatgccaacagtatttcactgagtgcaccttgttttaaactgaagcaaaactgaagtgtaaaaagtaaagtagaggttcctcttcaaagactttcctccccatctaattaggaataaatagtaacttctcttagaagcaaaatttattctaagacctgtgctaacattcttaaatatctgctagctgtaataaagaaatcaatgtactttatgttctcagctcccacaatttagcctaaatatttgccctggcatgcttatactggtccaagcaagcattaagtcatagcctgttcctcttccttatttgaaggtgtttttacctttctcagtattccacaagttacttcctccttcctttgttctcctctgccgttgcctcttttaaaaagttctatgttgttagccaattgggacaaatacaaaatgtgaggtcctgttccagccaatggaaaccggacacagcagtagggtgggcgcctcaggttataaatgaccctgtctcctttgttcaatgtactctcgtggcaaaactgctggcgaatgtaccctttctgcagaaagtaaacatggccttgctgaggaaattaaatttatgttccagtgctgtttctttacggcactggggaacaagcatttctaacagaagcctgtctggttctgagtccctgccctgaacccctgcctttggatgtcagttaactcacttataaaaccgctgctctggagatgaatagttctgttggcatttgtgagattgtgtcttatcctaacagactaatttttatggaagctgatgcggatagttgtttattcatggaagaaataatgtgttgattgcgttaatttgctaaactctggggatttagtagagagtaagacagctagttgttgccctcatgaaggttaagtgtgaaaagggctgcataattgcagggcgtggtgtatgtgttcatgtggcaatgatacctagccaggtgtgggaggactggaaaggcactctaaagaaagtggcaggctgggcgcggtggctcatgcctgtaatcccagcactttgggaagccgaggtgggcggatcacctgaggtcaggagttagagatcagcctggccaaaaatggtgaaaccctgtctctacttagaatacaaaaattagccgggtgtggtggtgtttgcctgtagtcccagctactcaggaggctaaggcaagagaactacttgaacccaggaggcaaaggttgcagtgagccgaggtcgtgccactgcactccagcctgagtgacagactcccatctcaaaaaaaaaaaaaaagaaagaacgtggcattagctgaaactggaagcatgccaccctggactctgggaggaaatggtcattttcctgtcacccagactactgcctcccagcctgactcttcagatccctcttgcctctcaaagtgttcatttgtttgttcattcattcatttattcttccaacaactgttggttgaataacaactgtgccaggcgtgtgctcgggatttgaaatacctaacttgaaccagctggacaagggtttctgtccttatggagcttacattttaatgggctagggaggtgcagagggtggacagtgcacatcataagtaagcagatgctatgccagaattctccagcctgcaaccagagctagcccttcatttccttgctctgaggctacagttcagtttctctcatgtggctgtgaggcccagccttcccctcgcctctctcttcaggtcccagacactgtttttcactacgcttctatttctaaggtgtcttttcagttaccacgcctgagaaagttttcaggaatctatttttggattagagatcccctgttgtcacatgccctctttaaaacttgtacataacatgcaccacataatcattccttagctgctgtgtggctgtatttaaggtttgtcttttccaccagcctgtaaattacctgttggccaagatgatgtctttcttgttccgtcccgtgtcttcagggcccagaattgggcctattgtaataaaagctggtttggtaaaaggggagagagttactggctgaggctggctgaactgagaaggctgtgcaaggctggggagcctgcctgggccttgggctgcagggtaagatgcaagatgaacaggggtggggctgagactcatgcttaggcggacaggatcaagtattgaaaccagcctagggagttcaaacttggttttgaggcaatgggatgtcatgaaaagcttaagtgattttggggactcctagtttgttttgataacatttaatattctcaaaatcattaataatttgataacttcaggcatggctgatttaatttttaaactatgaaaatatgaagtatgaaattatgattcttatggtaaaaaagttcaacgtgtacctaagagcatacaattttaatttcccttttcctacaacttttaatcctaccttttacatttatttatttatttattcttaaatatagacaaggtcttgcgatgttgcttaagtcagtacagaactcctgggctcaagtggtcttcctgcctgggcctcctgagtagctgggattataggcctgagttaccatgcccggctgtctgtcctacttttgagcagtaaattggtttctgtagctgtctaatgcttaaactttcctgtgcgttcaaatgtgtatttctgtcttaatgtaggtaaggtcatacgctatgtactccaacttgctacccccgcccccagtatatactttattttgcttatttttacagtgtaagagttactctcttaaagcttaattgtcatttgtcattgccttgtatagaaccaaggcatcttggactgtgtaccaaatcccataagatctggccagaacagggccacgccgtccatacctccttatcttgtgctttgctgccacttccttactgtgtttcagctttagctgcctgatattctttccctatgaaattgcttcctcatctaggatttttatatgtgtggttccctctgtctaatgttctttctccctgatctttccatggtagctagctgtttatgtttatgtgtgtgtgtgtatgcgtgtgtgtgtgtgtgtgtgtgtgtgtgtgtgtgtgtgtgtggttttagagacggagtctcactttatttcccaggcaggagtgcagtggcgccatcatggctcactgcagctctgacctcctgggctcatgcaatcctcctgcctcagcctcccaagtagctgggactacaggtcccaccaccacacccagtaatttttgtatttttttgtagagatagagatcttgccatgttgcccaggctagtctcaaactcctaccctcaagtgatcctcccatcttggcctcccaaagtgctgggattacaggtgtgagccactgtgcttggcctggctagatgtctttatccttaggtttaaaattttactccagaagggccctttctgagcagcctgtctgaaacaagttctccctagtattcttgcctgagtactctgtttctatgtaacatttattttagttatcaattgatttgtttattttctgtttctctcattagtttgtaataagctccatgaaggcagaagatgtatttcatgtagtgttgctgggcagatagttattgaattaatgtataagtggttgaataagaacatatagatcaactgcattctttttaaaggctaatatttcattttatggatgtaccagtcctttgttgaaggcttactaaattgtttttcagaatttttttcttattaaaacaccaccaacgaattcaaaataatgaatttctttgtatgtctctctgtgttcactcatgtgggtatatctgtaggatgacttcccaggagtaaaatttcagaacaaaagataacgtgtcctcaaacttttggtagatactgacaatttctttttaaaaagattatcccattttctatgacaccagtaatatgagaagtatttaactttgtcatcctggccattatcagattttaatttgctagaggaaaagtgagatctcattgttttaatttgtatttctgtaattaggagcaaggctgagcacagatattgtgcttctggaactgtttttctgtgagcttttaatttaatcttttgtgatgattgttggtcctttttttagttgattcagagtttgattaaagttttttaaacttatgatgttataggcaacctttacagtgtgatgtcacttagtgccattgaatttggagctatatagggctttttatctcttcaaaagtaattttgtagagcctgataataaaacttcatgttctcaaagaccatattggggctgagtgtataatatttagtagtttattattgaaacagtaatagagattttaatgtccagtgcataataggtcctcagtaaagtatttttggatgaatgagtgacaagtgaaaagttaatttttaaggcagcttgattttatttgaaagttcatttagaagaatctaattttcatagtaagaagacttagcatgctgttaagttgaaagataagcttgctttgtggcatgctatagaagtgttggatttgtggcagtggaatttttaatttgctgtgtcagatatagatatggctttatgtatccatacacacccagctataacatgtatattcaaataagtgacaaaatatgtctaatgaatttttgaattaccttttaaaacttgcctgttagttctctcaagtgatgaactttttacaatagcagtttattttctctcatcacgttggaaagaaatgttaaaagttttcttctaggtttattataatccagtcttcatcagccatcactcttcctgtattttgttcaagaggcactaattgttcgcatttggcaggtttaacacttcctgacagagaggctattaaggggaagtattctccaataactgtcactggctggaacaaagaaccttccaactcaatgtgtggaaaccactaacattcttaaatgacccttttcatggattttcatccctttaagctaaagtttggagaatgtagggtcagcgaaaacagcaacgtgtaataaagcagtaaaccttgattttggaaggcatagggtgggagatatagatttatctctgacttgaaaacaattgttatttggaaaatctcattagcagatgtgactgcttggagtaaaaaaaaaaaaaaacaacttaaaactgatgtcgctttcaggacccctttgaacttaacaagcacctatttgtggagcagactggctaatgaaaggaaattaaatttttctgacaacttcccctgccaacctccttattcaggggatgttattaggtactgaagaactttaaagaagatttttttttattagacataagtgaaccagttataaacatccccccccgcccccttctcggaggattctgacatggttgctctacattttaaacgtattagcttaaaagcttaaaaaacactgggcttcacttcagcattttagtcattttctaaaaattcagtcacacttaccagctgtggtttcaaaacaatattgtcagtctttgtggtagtttagtttgtgtcactgaattacacaaacacacacacacacacacacaccccacacatacccacacacacgaaggaggcttagatttcaacattatctttattgttatttggggaaatgattcagcagtgtcctgtgttggatgtgttaggtgagggttaatgatcagtgaaattacttagattcaagggaagtttttgtcttttcatcttcttagaggtagaagtggcattggttaatatttagcaataactaatccttaaatggataaacttttaccccttactgtttaggaaggtattttctttcttttgctttttggagttttttcctccagtagttggttcgttgaaattaaagtttttttttaatttatgtaacaagatacaattgtagagataaaatatgtacctgaaaaaaaaaaaaaagaaagaaacaatagaaaagaaaaggtaatgcagattaccaaaaggattttttggaacaattcgtaattcctgtaggtactggaaattaactttcatatttctgcaaaatcgatcaactactcccaaacaatagagaatcaactccccctgctgacagaatctaggaaaacatgacacataatattggacagaaacaagctggctgcggacaagctttaatgacctgatttatgattcagtattgattgtaaacatctaaattctgccattaaattccggcaactgcaccaaatcattggcaattctggtagtgcttcctgccagctcatttcaactgctttgagtttcttaatataataatgatgaggtagaatttacattccacttatggtattaattttacatttctctgaatgaaaagggttagaaggtagtaaaattgaacattaaatgaatcggaggagacagtagtgcaatatatgactgccctaaagacattgtgcaatgcctcatgggattaatgttgagtctcatttcctgcttttacaggatgcagaagaagctgtcagaattgcaagggaaattggtaagtccttaaattaactttggtaggatttctgtgtctttcagcagatacggttgagtcaacaggtaataagtaattcccatagagcaaataatactttaatagttttagattttgattacttgttgctctggaagaatgtatcagttgaattgccaaattctattattaaaggagactgtaaagagtaatttgaccttaactatacataactcttttgtaagatgagatcacaggctaattcaaagaaggaattgtcttaagaattctaaagattggatataagtttaatgtcaatttatatgtacatagttgaatgtggtttgttaaaattaagaacatttggattaaaatgaagataccatatgtgacatagttctttaagtttttgccttttgctaagatgttaggtatcaacttaatcttgttagatgggaaagataaaatagatgtgggaaattagaactgaatgatctaaattggaataaaaggtagactggaggagtttttaatggctgttttacatgtacttgtatttgggcagtgtttcccaactttttaatttcttttctttttcttttctttccttttttttttttaagatggagttttgctgtcattgcccaggctggagtgcaatggcacgatctccgctcactgcaacctctgccttccaggttcaagcgattctcctgcctcagcctccctagtagctgggattacaggtgcctgccatcacgcccagctaattttttgtatttttagtagagatggagtttcactatgttggccaggctggtctcgaactcctgacctcaggtgatccacccgcctcagcctcccaaagtgctgggattacaggcgtgagccaccgcccctggctcgcaactttttaattttaaaaatattcttggcggtcatgagaactatttttggtatctgctaattgagaaaatgtgtaagggcatgctattatatggattaacaatattgttaaataactttgcaggtttaataatcaaatcagtaattgtatacatttgacagaaatttgtacagatgagagaaattaggcaatgcttgtagggatcccagcgtcttctcagcattcctgtacgcctcagtccaagcatctcatcgtgccacacgaacatttctgtaggcctgttttctcactaagattatttagatctattttctgcctctagagagcatttgatttggcaaagctcatatagttgtgatatgtagaaatatcttattggtctggaagtgatcacttgtactagtaagcgtgttctttgcaaatgggacagtctaacttagcaggtctttagtgacctgaaaagcagtttggcttattgcacccttgtttgtagttggtactgtctaaattatttgggctttgcccatcattaagtgtgttttgttgtttgctttgcaaaaatctatcttattgatataggtcctggatttaagaccagaccatagaaaatcttattttatctgactacctcatctcttcattttttttttcagaatcattaacatttcaaaaagcctatcagtacttcataggaacatttgctcgactgctaaataaactggactatatagaactgattctgtggtttctttatggagaaaaatcaaaagtttctgttcatggtttgaaatcactggtattcctcattgcctaagaggcatataatatacctactggcttttgaggatagttttctaaaatagtttaattccatcctgtcagacatctttacatttaaaaagctctttttctagttctaggttagatattattatcaacctcattggatataataatactgttattattattattacagtatctacataaaggacaatatttagagaaatttagggaaataaagggattagaagaaaatttacagttacactgcagtgccacattttgaatggtgaattttggacttgcgagcattccctttgtgtaaatagcaggccgtggattgctttgcttcctttatgccttttcttccactttctttctttctttctttctttttttttttttttgagacagacttttcactcttgttgcccaggttggagtgcagtggtgcgatctctgctcactgcaacttctgcctcccgggttcaggtgattctcctgccttcacctcctgagtagctgggattgcaggcacacaccacaatgccagctaatttttttgtatttttagtagagacggggtttcaccatactggccaggctggtctcgaactcctgaccttaggtgatctgcccacctcagcctcccaaagtgccgggattacaggcataagccagtgcacctggccattttccactttcgttataacctgtcacctttaagataaccagctcatcatgatgggcctctgtctaactagttctcatcactttgctttcctccctcaatattttaatgctgtgctttacctccttttcattttttattttttcctactgaagttacctaatctaatctaagtcttttttctttgtacttgggcacatcctttatgactcctttctctttcctgtccttcttctaattcttccccaattactctctcttgcttgtgaaataaatgatagcaatcatggctattaagtataagagtactggtgttttgcttatactgaaagaaagggaaaccataaaatttgaggtaaaataaaccataaagaactagggtcatcagctcttacaaagcttttagaatttctctgaaaatctcttctgaatcacctcagaagcctcgcataaaatcttttccttgaagtgctactttctaaagtaaattaaattatgttttattaaagtctgttggctttctgtgttgtttgatatttcgtaagttttttactactgattttattgagatatatcacattttaactatgattatgattccatgtgaaaatgtgttcctagttctaaacaactgatttataatcaaacctttgaacctatccatttgtaagttgttgattgtccatgtgttatacctattcatagagttctctcttaattctttctgtgttatgtgatgaaaatgaagtttatcctgttttatgtgatttcctcctctctcatgtctttgcttttcttctggaaacattaatctatgctgccaaagtaggaaactcactgtattgagcattgatgaattaagtgccttttacataatggtaactccagtttatggagcatttcttcctaaggccaggcactttggaaatgttgtttctaatgctaattcttgggtttaatcatttttgtttacatttaaggaaactaatgattagaaatggtaagtaatttgctcaaggtcacagaactatcgagtggtggaccctggtttaaatttaggtttatttgactccaaagaccacagactttttattatactgtgtctaaaccaatgggattagaggatggcagctaaaatttgagcgactactttgtgtaaaatactgtaaggtactcaaatgtgttatacatggaattaaagaagcagacagtctcctatccttgatgaggtgagagacagttaagacttaatatgttacttgtatgtatttgttttttggactacctagtttctctcattcttgttcctgattttttactttgacctatctaagttgagagatacagagctattgatcctcagtttgtctttaacctcaatgatagacaacagtaatcagtgagcttgatttccattgaagtttgatctttttactgggccaaaggtccttaatacaatcaagtcaaaattgattcttgaaaggaaaataaattgtgaatctaaaacctgtcctttaacaacttccagattattcagattcttttcctttgcttgtctttctcacaatcacaaatcatgcccaatttaaataaaaacttttttttttgatcctcaggtctaccatactacaaacctacttctcccagaatttccaaatctcaataaatgtcacccctttcagtcaggccaaaactgagtctctcctggatgcctcttttcctcatcatcctgttgtaaatacatcaataggcattgtcagttcatcttatatacactgtcttcattactaccactctcctccaaactacttttgtcttttgcagggactgtggcaatagtttctttacttcatttcttaaacatttcacatagctgacagtgagatatttaaaatctttaaagaacaaggatatatttcatctcatcccagcccatttctgctttaaattctgtaatgactccattgaacttagataaaaatcacaattctttactctgactactatccctatgtaatttgacacctgcttttctctccagtcttattgtatactactcccttctctgcctcccatacttcagtcacattagcttacttgaacacagcaaatttcagggccttaggataagtttttttttttttttaatcttttgcggggtgaagggggatggcaggacctagcagactcttgctgatatcttcacaaaaatagctccttgcagtctttcatatcttagcctaagtatcatgtcttcaagagaagattctctaatactgccacccagtcattctctgtcttataactattttctaaatttctgcatagtattcatgatttgcagattttttttattcataaacttttctccaagtattttattttgaaaaatttcaatcatacggcattttgaaataattgttacggtttatactcgtatacccaacactaagatcccactattaacctttttctagatttgctttaccacttatctgttcatatactaatccattttatttttgttgcatttcagagtaaattgcacaaccagtatatgtcccattaaatacttcaacatgtgttattaattgaattcagtatttgtatacagttttgttattttgatgccaaatttgcacacaatataatgtgaacaaatcttaagtgtgtatttgtggattttgacatatgcatatatatatataacttagaatcccaccaaggtgctgaacatactatttccctggagatttccctcatgatccttccaagtcagttctcgcctaccccctggcctgcaggtaacttgttcagatttttatactaaagattagatttttaaaaattaagataaatttttaatactatacaattcagcctttcaaagtgcacaattcggtgattttttgtgtatttacaaggttgtgtaactgtaatcactatctaatttcagaagatcttcattactccccaaagaaactctgtactcattagtatgtacttcttattttctttccatctagtccctgacaaccattaatttactttgtgtcttgtggatttacttattctggggatatttcatataaataaatggaatcacaacatatgaacttttgtgtctggtttctttcacacagaatagtgtttttaaggttcatccatgttctaccgtttatccctttttacggttggataattttctattgtatgtacatgccacattttgtctgttttttatttttttgagatagggtctcgctcttttacccaggatagagtgcagtggtgtgatcccagctcactgcagctttaatctcctgggctctactaatcctcctgccttaccctcctgagtagctaggactacaggtgtgtgccactatgcctaatttttgtatttttttgtagtgggttttcaccatgttgcctcagttgatcttgaattcctgggctcaagtgatccacccacattggcctcccagagtgctgggattatagacatgagccactgcacctggccttatctatttattcatctattgatggacatttgggttgtttttacctcttggctattgtaaatggtactgctatgaacatttatgtccatgtatttgtttgtatacctgttttcaattattttgggtatattcttcgaagtgaaattgctgggttatatggtaattctatgtgtaacttttggagatactagcaaattattttccatggtggctgtcccattttacatttctaccaagaatatataagggtttcaatctcttcatatccttgccaacccttgttattttctttcttttataaggaaaactattgccatcctagtgtgtgtgtagaataatatcttattgtagcagagggaagaatagattaaaaaaagtgactcaactatatgctgtctataagaaactcactttagatgcagagacacaaataggttgaaagtgaaaggaaggaaaaagatatcccatgtaaatagtaaccaaaagagagctggggtggcatactaatgtcagacaagataaactttaagtccaaaactattctaagagacaaagaagggcattttatattgattaacaattacaaatgtatatgcaccaggaaacatggccctaaaatatttgagataaacattgacggaattgaagggagaaacagactaattctacaatagtagttggagactttaatagcacactataagtaatggatgcaacatctagagagatcagtaagggagggaatagaggacttgaacagcactatatactaattagaccttatggatatataatgaccattctacccaataacaatataaggcacatttttctcaagtaactattaaaagaggaaaggagtgatgattgagttaaaataattgttaaagaaaaagaaaatataataacaaacaggagcaatatctcataaagtgttgcccatgactcgcaatgttcccaagacttagtttgatatagaaatatttttccccgcatgtactgatttatattgatggattgctcttttcttaaaatagtataggattctctgcaatatataaattttatttttctttgcaaatgattgctttatattaatttgattactattttatagtaaaatttttgttgtggtggtggttgttttttgagacagagtctcattctgttgcccaggctggagggcagtggtgtgatctcagctcactgcaacctctgcctcctgggttcaagcgattcatctgccttagcccccacttagctgggactacaggcatgcaccaccacgcctggctaatttttgtatttttaatagatacaaggtttcaccatgttggccagactagtctgaaactcctgacctcaagtgctccccctgccttggcctcccaaagtgctgggattacaagtgtaagccaccacatctggctggttactattttgtagtaaaattgaccatgagttagttttctttgtatttctaatacttaatgcttgttacagagtatatattcagcaagtggttatttggtgaataaatcaaaatgaaatatgtatatatatgtatagaaatgaattaagcaatcacatatttaaagttcttttgtaatatttatagaccagaatttgactataattttctcccttttcccccttaatcttcaattttataatagagatacctggggaaaaaaaggaatattaagcaaaacatgataaactttcagcaaatagataattgaaacaaaatgatctaggattattcaaataaattcagtatatacttgttagtgactactagtcatcaattcttgtaggctgtccttgtgttcattaggctggactaatagaaatttataggaatctaagattcaaatgtatgaaagtcttttactgaaccttattgcctttacaccagcctgttcccatgacatcttatgttctttgaaagtctggctctcccatttgacttattttactattagtcttctgatgtagtgtgtctgccctgtctctgcgtagtgtgtgggggctatatggtagtcctttcttttctgccctggctgtttgcctttgcctattcttctcatcttccttttggcataatacaacatttttttaaaaagttacttttgttgcttatatacaaccaataattcatacttaagagggataaaaatatgtggctaagtcaggaatctttttattttgtctatttcatgcagcttagaaaaattttcacatgttatatatgactctggggttaaggttatatggaagaaacctttgcaaaaacattacaatttataccttcttcacaatcttacatcttgttaatttatttgccaatttcgtcttcaggagaagacatttaatatttaaggagattgaataacgcctaaggaaaagttatgttaaagaaaatggcattaaaataatctatgtgaaatccattaaataatgagatgtatattttgctgttttcctattattgaagtgatgtggtcatttgagattagaatgatattccctgggagacaggaacttgtgttctgtggctttttttcttctttcttttccaatgggtgcttatattttcttttattattccaacatgcacatttgggtttaagcataatttcacaagttctttttctgtcttttactgttaaatttgctgtttctgtctccctttatttctctcagtccttcatcttctttctcttgttttattgttagtcattcgtgaataccatttttttcctttttctattactctgttggaaaaggctgtgcataacattcaggcaggaatgtggaaacacattgtaatgtgaaaaaaacattgctttttttgtttggaaacttcctgtgtgtgaagcgttttgctctaatctgggcactgaaatgcactgatttccgatccctggagcagagttagggatctagtatttttatttgcctaagtagagagaaataggcaggcaaaatcagtttttcctttctctgccaaagaaatagtgtcataaaatagtgtcatgtattggtttgtttagtgtataatacatctggattatatttttgtaggtactgaatattgattcttatttaaatatgtttatatagttatttgtatatatgtgtatgacagactgaggaaaggctgtgtgtgtgtgtgtgtgtgtgtgtgtgtgtgtgtgcgcagtagtagagatgtggataaatcatagactccaacatatatatgtttactagttactggataattacagaccccaaatagtattgatgcaaatgtgcatcacctcagtctgaggtctgccaactcgaatgatactccaaaactaaactgataatgatgaaactaaatataactattttgtgatttaaagagagcaataaaatcagtggaaaattatgatcaaataaaaaatgagtaatgcattgatagtagagtgtatttccccaatttgtttgaatttaaactgtttccttgtttgtatctacagcaggaatttttcagtgttagtcacatggtgcatggcagccaaatttcccagtagattctgaactagattccttggaaaactctagtaatatgctaaatttaattggagtttgtggagttgtcattagttcaccagacctcgactataccacatttttacagcccctctcctgtcactttaaacaacacagatttagtttttcttcattctgtgtgttcaattctcattcgtcaggttgtagggtgagaaggaggcattttgttctatgctatccttattcagtggctaaggctgatggagtttccaccatctgcaatgtcatagattacagaggcaggacacagaaaagcctcagttttggtaatcatcaataagacattcttcatgacaaggtgtttactattatatctcattgtgtggctttgaaatttgcagattgtcaccaccatctcctaaatatttcttgaatttatctacttctctgcatttctgttgctattctctttgtttaaggtagtgtcatcccttgcctacatcactgtaacagcttttgaaatgtactcctcttatcatagcttgtaatcccttggaggtagactctggaagcttattgggggaaataattttgggaccaatacctgagggggaatgaaggaaactgagccaagggaaaagttgaattgattctctctcaacaaagccatcagctaataatttagagagctgtgaatatttgttggtcttttttagttgttccaagttcgggcaagaggattcagcctttatacacctgtatcaactatctagggggtgtgggctgcccctaggaaggggcatgaccttaggcagaaagccgaggacaagtcagcttttggttgacaatacttacaacagttggggcaatgtcctgaactagggatctgggcagaaaactgtacttaataactttgagatatatttttcatgattgttcatttctaagtaatttcagatttctgctatgattttgactcatatgttatttggtgatgtattttaattctttaattttttgagatagagtcttgctctgtcattgaggctggagtgcagtggtgtgatcacggctcactgtagcctcaacctcctaggctcaagcgatcctcccacctcagccactggagtagctgggactacaggcacatgccaccacttttggctaatttttgttgttgttgttgtttttgtattttttgtagagacagggttttgccatgttgcccaggctggtctcaaattcctgggctctactgatcctcctgctttggcctcccaaagtgctagaattacaagtgtgagccaccatgccaagcctagtgatatatttctaaataactgaaaaaaaaatagttttttattattattgatttctaacttaattgctttgtggtcagagagtatcatgtttttcatttaaaaatctttcagatttgatgaaaattgctttatggctaaggaataagtcactctgatacatattctgtatgttcctgaaaagagtgtatattctcaaattattatatgcaatgtcttatagaaaactcaagaggtcaaacctacctattgggatattcaaaacttctagtgagtttttttttttttttttaattaagacaatggagtctcactctgtcacccaggctagagtgcaatggtgcgatcttggctcaatgcaacctccgcctcccgggttcaagtgattctcctgtctcagcctcctgagtagctgggattacaggcacccaccaccatgcccgaccaagttttatagtttagtagagatggggtttcaccatgttggccaggctggtctcgaactcctgacctcgggtcatccgcccaccttggcctcccaaagtgctgagattacaggcataagccactgcgcccagcctgtgtgggttttttttttttttttttttgagacagagtctcactctgtcgcccagacgggagtacagtggcatgatctcggctcactgcaagctcccctcccaggttcacaccgttctcttgcctcagcctcccaagtagttgggactacaggtgcctgcctccacgcccggctaattttttgtattttcagtagagacgaggtttcaccatattagccaggatggtcttgatctcctgagctcatgatctgcccgcctctgcctcccaaagtgctgggattacaggtgtgagccaccgtgcccggccttttttttttttttttgagacaaagtctcgctctgtcacctaggctggagtgcattggcacaatctgggctcactgcaacctctgcctcccgggttcaagcaattctcctgcctcagcctcccgagtagctgtgactacaggtgcctgccaccacacctggctaatttttttgtatttttagtagagatgaggtttcaccatgttggccaggctggtctcggactcctaaccttaagtaatccgcccacctcggcctcccaaagtgctgggattataggcatgagtcaccacatccagcctttttgtgatgtttttggatatctgatggacctatatttgaaaaagtgattttccaatttttccttgctcgttaggttttgtccctgtttagataataggtgtattacagtgtatcgtgtttccttggctatcaaaacataatgaccaatttttgttttcaagtctaattatgatattaatattcctaaacaagcttatttttgttttatccttgtatcattctttatctttttcatctgccagtgaactgttgttttaggtgtgtctcttgtaagtgcacatctaaatttggactggatttttattttattgtttttctattcagcctgctggagcttgtcttttagctggagagtttagtccatttatatttattgtatttaaaattatattttgatttatttatataatctactttttgggggttttgtttgttccattctttggattctgttttctttcttggcttctttttgatgacgactttaaaaaaaatgtctcttgttcttattttatgtccccttcccattcctccctccactatgttggaaattttatactctatttctattgtttcagtgcttgctatagaaatttcaacttggagacattccttcaggtgtccttcatctttggcaacatttagtgttgtcagtgttttggattttagccattctaataggcacatagtagtatctcatagtttcagtttgcagttccctcatgacatataatattgagcatcttttcatgctattatttgctatctgtgtttcttttttattgagatgtctcttcaaatcttttgttaatttttcaattgggtggtttgtttcctggttgagttttaagagctctgtgtattttggatacaagttctttcttaggtatgggttttgtaaatattttctcccagtctagaacttatgtctttattctttttttttgagatggagtctcactcttgttgcccaggctggagtgcagtggcgcgagcttggctcactgcaacctccgcctcccgggttcaagtgatcctcctgcctcagcctcctgagtagctgggattatgggcacccgccaccacgcctggctaattttttttttttgtacttgtagtagagatggggttttgccatgttggccaggctggtctcgaacccctgacctcaggtgatctgcccacctcggcctcccaaagtgctgggattacaggcatcagccaccatgcccggctgtgtctttattcttttaagaatgttatttgggctgcagaaatttttattttaatgaagttaaatgtgccaatttttaatggtttgtgcttttggtgttatatgtaaaaactcattgctaaaccaaagtcacctagatgttcttctattttttctctagaaattttatagttctgcaatgtatatttaggtctgagatccattttgagttaatttttgtgaaaggtataaggattgtggcaagattaattttcttgcataatgaatatccagttattccagtaccctttgtttggaaagactatctgcatttaattgccattgcttctttgtcatagttcagttgactgtatttgtgtgggtctacttctgggctcttgagtaatttgtctgtcttagacaataccatactgtcttgatgtctgtagctttatagtaagtcttgaagttgggtattgttagtcttttgaatttgttctttttcttcaatattgtgatgcctattctgggtcttttcctttccatataaactttagaatcagtttgtggatatctacaaaataaattgctaggactttgattttaattgtgttcaacctatagatcacgttgaggaggattgatatcttaacaatattgaatcttcctatccatgtacattgattatctctacatttagattttcatccatttctttcgtcagagttttgtagttttcctcatagatacactgtatgtattttaagattcatgcctattttatttctttagtgctaatgtaaatgtcactattttaatttcaaattccagttgttcactgctggtatataggaatgtgataatcttttgtatattaatttgtattctgtaaccttactataattgcttatcagttccaagaattttgttgttattgctgatttttttggaattccttcatagacagtcatcttatccactagtgaagacagttctatttattcctttccagtctgtttactctttatttccttttcttaacatacttcataagctggaatctgcagtcagatgttgaataagagttgtaagaggggacattcttgtatttttcctgatttttgggagaaggcatccagtttcttgtcattaagtgtaatgttaactgtaggctttttgtgtatattctttatcaagtacaagaaatttctctttattcctagtttgctaaactcagtgattgttgatttttgttaaatgctttttctgcatctatttatatgatcataggatttttcttctttagcctgttaatgtgatggattacattaattgatttttggatgttgaatcagctttgcataccaggattaaatcccatttggtcatggtatataattctttttatatattattggattttttagtcattttaatatctaaaaacttaattttaaaatgtttgcttttttcttatttatctcatcatgtttatttttttctccaaatcattttacctgtttgtaatagctgtaacttataatagtatttgtaacaactgttttaagagtcttcatttctgggtttctttctgtcagctattttccttctgatatgaatcacattttgcatctttacctatctcttaattgttgattggattctagacattgtaaatgttacattgtgtgtttggattttgttacctttatttaaaaggtatagatgtttagtctggcaggtacattaattttgtttaggttaaggccttttaggctttaaaaaagttttcttagggcaagtctagcatagtcctttctcgtgttctgattaaacaagcttgtattatgctgtctctctacccgtcacacttcctgtcctttggttcataatttctatttcattatacgtctatggttttttcgtagtataatgtaaacccatgaaagatgtaggcaggagagagatataatagtatatataccttaagaaaatttcactgaccactatgtggcttggatgggggcaactgtagtagtggggagttctgctagtaggccagtacaagagtcctggactgctggtagtttgtgtaagtattatgattaagtattatgataactgagataaagaaaagtgaatagatttgatctttttaaataaagaatttataagagtttcatactatccagcagttgtgctcttacacatagatccaggaagctcatatacaaagttccagacaacaagtacaaaaatattcaaaggaccattgttatataaatagaacaggttacagtctgaatgttcattcacagtggaatggataatgctgcagtatgtttgtaggtgacatagattacagcagtaaaaataatgacttacagctgctcagattaactaatagatttacttagtaactcttactttgcatgttattctttaggcagtttcagccactgcagaaacaacaaagaagacaggcaaagatctttgtctttatgtttttttaatcattgtgcagtgaacaatgtagatattgactaaagcaagaatcattaaagttcatttttaataatgggtgaaaattgtttggatataggatcatcacagtttcaaagtatcaatctacagattatttgctaagaaaaaatggcatactttctgtgaggaaatttaatggatgccatcttaagtaatcaagctttatcagtttgggataaattgactttttattttacttttgatgcgatggaagaactcgaggatacaatatcaactatgttgtatttaagatttgttaaacatcttgaatttaatgagtgaataatcaggtatattcaaattgtggaatattctatcaaacaaccaccctgggttcttcagaaatatcatggtcatgaagaactccccccgccatcagcacaaaacaacaaacacaaacccacactttcccttctggggaggctgagggggttcaaaaggcaagtgaactactttacattagaggagcacaaagaaacgaaacaaagcaatgcgtactatctatgtaattctcatgagcaactttcatctggggatttccttcctttctgtcctagttctttctcggagtggggtgtcttttctcttctgaggtcctattacccatatcagggcctattctatccatctagaggactgttcaacttcctgaaatatcttttgttttctttttaccttggacctttccttgaggaaacaaaggccttgtagttaattataggtgttttgcaattggttatttaaagaagatccccattccccatcacatctccttgattcatgagagatttctgattagtaccgctggattaggaataagacattttctaagaaatacttttcttttcccttctttttatttttcctttcccattagtatattctatgaaattttaattcaagaaattgtaggtgagaaaaccacataagattctttattatacagcgtaccactgttgcatcaatagggtgtcattttatcagcttttaagttaccaggttgtgctaccatgtgtggcttgggttttgcttgaaaagtaaggttatttattgtgtcttgagtaggtaaatgtgacattatcagttggtcaaaaaagataattctttttaacttggaatccataactaaatggaaaatctcctaagctcctagaatcttccttcattcatccccttatcttccacatccaaactgtcgctaactctagtctttgtctttctctctatctctgttgctagctggactgctgcaaaggcttcctcatcagctccttgtttctacctttgccctttcaccattcattcattgcacagcagccaaagtgatcttttaaaatgctgtattaggtacttccctttcctgtatcacaccttccaacttgttccttctgtctggactcatcccccctcactgattttcagagtgctcgctctatcttgtcattaggttctcagtttaaatactagttttctcagagaagcattttcaaggagcagtaaccctgtcactctcagttacatttattccctccgtgttatagcagtcatcactatcttacattgtgtataagacatacatgcacttatttatttatattaatatgtgtatatacataaagaaatactgcagccttgacctcctgggcccaagctgtccccccagctcagcctcccaagtagccgggattagaggtgtgagccactccacccgactcagacatatatttagatgcatgtatgtttgtatatcattgtctgctagatagcagggagttttctgaatcgttggcctttgtagcctgcagagagccagataaggcttatagtgtatattcagtaaacattttttaaactgatgaatacaaatttgatagtagagttagaaagaaggctgcttgctttgtggtagaaagtaagacgcactggtagctgggaggtgagggacccagagaagatgtcctgtcctgcacttaaacctgcccttgaaaactgagtccagaaaagtagcaatggaaactttgtagtactttgctaacctaagtttctgtattttcttcgtatattttgtcatatagtattagtagatttcttttcggaagcattagtgcctcttttattgtgcagaagagaataaggagtggagactgtctctgtgttggaggttcagtgtcagtaggggagtcacttctgtgtctggggtgaggtaaggtagtagcagtaagcatcccatgagaggacctggaaggtgaggaaaaacttgggaagggcactagagcctgatttttttttttttttttttaaagcagtctcttctactaggactttcacctccttttacgagtagaatttgtattttgttatgctctgtgtattagtccattctcacactgctaataaatacatacctgagactgggtagtgtataaagaaaaagaggtttaatgggctcacagttacacatggctggggaggcctcacgatcatggtggacggtgaattaagagcaaagtcatgtcttaacatggcaccaggcaagaagagaatgagtgccagcaggggaaataccagacacttacgaaaccatcagatctcatgagaactcactcactatcacgaggacagtgtggggaaaaccgccctcatgattcagtcacctcccgccaggtccctcccacagcacatggggattattacatttcaagatgagatttgggtggggacacagagccaacgcttatcattctgtttcaaacatatgtcagctgaagaatacaaaattaaacaaatacagtatagacaagagtcaagcacagaagtaagtgctccagtggatgagaaaatgtgagagaacattagtggaaatttcatgtccagatgaggtgaggggtaacaagtaccatcaacttgatcatttctgatttttccaggaatgccaacttttgactaaatatttttttccttccacttcccatttacttatcttaattagagtggcagggacacaagaaagtagggatgagggactgaactgttggatattatttaacattatctgtgtggattattcttttccctcctcttcagatttctaagtattgtttctccatggtgtggtgacagcatatgtactgcctgaaatcgatttggcataagaagttgagtagaaaaccttactgttacattatttcagaatatagctcaatggttaaattaagagttagtatcagccaggttcagtggcttatgcctgtaatcccagcactttgggaggccaaagcgggaggattgcttaaggccaggagttccagaccaatgtgggcaatataatgagacccccatctttaaaaaaaaaaaaaagaaaattagctgggtgtgttggggtgcacctgttgtcccagttactgaggaggctgaggtgggagggttgcttgagtctaagaggtcaaggctgcagtgagccaagatcacactctgcactctagcctgggtgacagagcgagaccaaaaacaaaaaagctagtctaacttgcatcagtttcttccttcctcccaacatttttctgtttggcttgtgagattttggtcagggaatcttgccttcctgggttacatgtattcacaggtctaatgctgtgatgccagcagcactgggagaccacaatgccttattatatattgtcctattctctaatgacttcccaccttttctgagcatctgataattttttgttgataaattgttttatgtatcttgtttccccagcttgttccttgtgagcaagaatgatttccatgtcatattttgaaattcacaaatcactgtatagtccagggtccttagtaaatgactaaaatgcgattagtactggaaccagaaaaactgcaaatttcctaatcgtcagagggaactgaatgtagtggagatgtgggctgtctctcagctcttgtggcttcctgttacatggataaatggtttgtgatgatgcattgataaaatatttttttgagaggatgggggtaaggatctattaagttgttgtaaacagggttttgcaggtataccagtttcaaatttttagattgcgctttttcactcccgtaaaacaggctaattcttctctactgatttcattctgattattttatgcttgttattgtgaatgagacaaataccattcttgccattctcatgcaggattaaaactcgtgcataatctcttgcagaatcaagaatcaaagcatgcacaatcttctatgctttgtccccatctatgttttctattgtgttttcccctaccatcctgcagataactctgtacttcaactgaattgtttcagtcattccttaaacttgtcctataatctccacctctgttttccccactattcctgcctgaaatgttcaagtcctgctcattcttcatagcatcatttaaatagccctttcttttttttcttctttggaaacggagtcttgcgctggagtgcagtggcgtaatcttggctcactgcaatctccgcctcccaggttcaagcgattctcttgcctcagcctctgagtagctgggactacagacgcacaccaccacacccagctaagttttgtatttttagtagagacggagtttcaccatgttggccaggatggtcttaatctcctgacctcgtaattcgcccacctcagcctcccaaagtgctgggattacagacatgagccactgtgcccagcctaaatggcccttctgataatacacttttcttaattatttttctctctacctccctgtgatcctttctgttttgaattgccagtgatagaactatttgggtcctttgcttttctcttcttggatttgaaggctcccagtgtaagagcatgttctttatctgtcttctcagtgcactgagcattgtttcaaaaataccagcccatataaacatcatgaacagaaaaaaattttaattgaattaattataaaacgcttaggaagcaggtgccattttaactaagttgaagttaaagagtgatgttttgtggtttggggttcaaaaggtctatgacatttggccttctcttcccttttcctctaaggatcctatagcttgagttgagtgccagtagagcattacaggccaggaaggatcctgtaagggctcactgagctcttttttcttcagaaaagatcataaacaaatggtcccaaacataggagtatctctaccttgtttttagaaaacatctaaagaaggagacttgtacacttttcttgataaatcgttgtaaatgactcttgctgtcagaagttttactgtataataactaaatacttaatcatgtaactgatgacaattttatgagtttaaaactttagctggaagtgtgctttgttttgaccttactttgtattttcataacaccctgttaatgtacggaacagtggaatagcttctccattgataccagtgagccctggagcttctgctccagcccatagcatcgtagccaggtttggattttccccaataccatcatgtcacttcttgctaataaaagctgtaggggttgtctgtgactcttcagatgaaaataccttaagtacctgaaaatcaccatttttgaaaaaagggaatttgttatgcatgcaaacctcagttttggagatgtttcctggtgctattataagttgtttcttatatctttgattacttaatactgtacttctgtttttggaatccactgttaatttatgtgtgttttcttagcttttattactggggaaagtgttatgtttattggtacaagtacccttttttcttttaaaatggtcacactctcattttttaaatacatcattacactggtgttactttcctggtgttattttcctgactctaaagaaaggaacttttaaataaattaattattgttttctgcgttattgaacatgtggtcaattgtcatgttcatacatcccaatgatcaaagtctgaacttctgtctaattcttccctgctgttaggctaccctgtcatgatcaaggcctcagcaggtggtggtgggaaaggcatgcgcattgcttgggatgatgaagagaccaggtgagaggctgtccaaaatatacttttgatgaaaattgcagttaccagagttttattaaactgacaggtaaacagataccaaaagcataatggagtaattacagtaaccatctaatttttacacttttgaatgggaaaaagattgaaattatgtggaaaccttccttatttatattttgatgatgattatcttattatagaaagggttttactgttttaaacattaacaaaggattttctttttgtttttaccgtatatttttaaaaattacagtcaggattctattttctgggcataaattactaacatttggctatataattctaaatgtcatctaaagatttaaatcaactatatttaaaagcagttataatttcattgagacttaatgtattacctcaatatgtagttgctttcctttgctagtgcataaaagtagtgaattactttgataattttagagtgtgaaatatattctttttccttgagtttgaaattactgtgtcctttatatggaatgcgctcttattataatttagaatactttttatggcccaatctcagaagttacacaggtttccctccagtgaacacagcttctgctcaaattcaaggggaggggactgagtcttcacttcttcatgagagcgtgggcaagattcttagaagagcacgtggaatgggagatactgttgtggccatctttggaaaagacaatctgccacagcccgttttgtgggaaagaatggtatcataaagaagtcgaatacaacttaatggttttgcaagagatgtgtattttgtggacttcaatttttttctcattgtttttctgttttgcacagtacttacatagcaatttcactgaacgcttagcgcttatttttcattattcatcttaggatctcaggtttcttatcagtcatttctccagggctactgttagtaacttactcttttatggtgcggattactctttatagtttcttggaagtgaggtttgctgtgctgctgttgatttataaattttaatttacagcttaatattttgagaaatcactatatccattcatatattaggcatcattttgtaaataatttagccctttcttgccaagtaaatagcacattgattcaaaatatgtttataaaattaataaaaatacatgaataattttctacttaaaatattactctcttcagcttgataaataaaccatctcagaaaacttgttgagatcaacacaggcgtgcctattagatttaataatacaagctcctcattttaagaagttgctctatgtcccttatttatttgggaaagtcaaaactacctaaaaagggaaagaacagtactgcaaacatgcctatgcttgtcttttggagccactaaccgtgaacaccataccacaacttatccaccccttcttttcctctctccctctcgaggaagtaattggtttttacataatccacaaagatttcatttttcaggtacaaaggaaaatttggtagcttaattactttattcctttatcctaaggggtgtctttttcttgtaacatctttcctatgttttttggggggaagtagcatctatgacttgtcttggaatctgtaggacatctgaaagattttttttaaaaatgtaatggtttttttttttttttttttttttgagacagagtctctctctgtcgcccaggctggagtgaagtagcacgatcttggctcactgcaatatccgcctcctgggttcaagtgattctcctgcctcagcctcccgagtagctgggactacagctgcacgccaccacacccagctaatttttgtatttttagtagagacggggtttcaccatgttggccaggatggtctcgatctcttgacatcatgatctgcctgcctcggcctcccaaagtgctgggattacaggcgtgcaccactgcgcccaacctttattatatagtaaatttgggtgagaattatgaagattgttgaaggttcacttagatattttcatagtaatctctggctttcttttccctattcaagtttaaatgaagcgtatggcatgattgggaaactgattgtgtctatatttttgaatatccccactaagacttttggcattgtgagtgcaatttctgttttatttttgtattcctagcatctaaaatatatccaggcacaaagttcagtaaatacttattgaatgaatgtataattgaatgtcaccagtgatattcataatagagtttcccatgagttctaaaataggttgttggcgatgctttcaaacttgctgcttattttattttggtgactttgactttttacttgtggtgttctgggtttaaatgcaaaatgaaagatctcaatcattatagtggaggcaaactgtaaagtgctatattttttctttctgttattatatccaatctaataaaaagttgattatatggtatcgaaaactaattcattttgcttccagtttctttgaagtttgcagcctcctaagattcccctaaatcaacaatgtaatggaggactttattcccctaaatcaacaatgtgatggaggactgagaaaacctaataccttttctctgagacctctgagaaatgagttttttgcaatgttttgaaatttgtcttctagtcagttttacctgcagtgttgtacaaaaacaagcaaattagttgtgtgtgtgtgtgtgtgtttttttttttttttttgagatggagtctcgctctgttgtccaggctggagtgcagtggtgcgatctcggctcactgcaacctctgccttttgggttcaagcgattctcctgcctcagcctcccaagtagctgggactacaggcgcacactgccacgcctggctaattttttgtattttagtagagacagggtttcaccgtgttgcccaggctggtctctaactcctgagctcaggcaatccacccgcctcagcctcccaaagtgcttggattacaggtgtgagccactgcacttggccacaaattagttgtttccaatattactaggtggactgtaggattaaatgatattattttaaagttgtaataattaaaacgcatcttaagtgtaccaacctggattactatatgacaaggattatcattaaatttttctattagtagtctgtcatcgccaaaactagaagcagcttttgagatgaaaaaccatcctttaaaaaaaaaaaaaaggaagaacggtcagactaacaaaacaaatagagcaatagggctgacatcattaaagaaaacacaaaacaagcaaatcagatagttgttttttatattactagatggaccatttgcaacttaaaggactggaagaatttggtttcagtattgtacattaaatacagacatttagtcttcagattaagaaactttattaaatataaaaggaattaaagcacaaaaataagcaaattggatagttatttctaatattagtagatggaccatttgcctcttaaaggatcggaagaattggctttaatgttgtacattaaatacaggtatttaatcttcagattaagaaactttattaaatgtaaaggaattaaattttatatgctgattatatcaatggatagaaggcaatatatgctcaattacttttaggcaagcaagtttgggttttttttttaattgttttttcttttcttttttttttgagatggagtctcactgtcacccaggctgtagtgcagtgacataatttctgcccaccgtagcctctgcttcccaggttcaagcggttctcctgcttcagtctcctgagtagctgggactacaggcatgggccaccacaaccagctaatttttgtatttttagtactgatgggatttcatcatgttggccaggctggtctcgaacttctgacctcagggaagccactgtgcccacccaagtttgcgttttgaaaagattggtcaaatgagccctaaatatttgaataataggcatattttaatagtaatgatttaaattagtttgtaaacaaaatatataaagcaataattaggtccatatttttattttaaaaaactatacttttataattactatttttgatcaattttatagaagataaaattgtaatgatctgtgtgggtgtatgtgggaggcaactgcatttcaagatgtggatttaaaatattaagcagtgttcttaagaatcttcctgttggatgttcaatctcaatgagtgtatttgctgtagttccactccagtcatgcaggtgactagaccctttacatttttctttgcatcttctgacttctgaatcaaacagatgtttttttatatttttgctagtggaattaaggtatattatggttgaagaaatggaattaattttacttgctctgtatggtttattaaaatatcatatttaggctgggcactgtggctcacacctgtaatcccagcactttgggaggctgaggcaggtggatcaccttaggtcaggagttcaagaccatcctggccaacgtgttgaaaccctgtctctaccaaaaatataaaaattagccgggcgtggtggcacacacctgtattcccagctactcgggaggctgaggtggaagattcacttgaaacccggcaggcagaggttgcagtgagctgagatcctgccactgcactccagcctgggcgacagagtgagactctgtctcaaaaaaaaaaaaagtgatacttagcagttggtaaagtatcggcattcctgtttcaatggaaaatctaggatctgagaagttaaataactcatccatggtcacagagttagtgagtggaaaagtcacaggtcaaccaaaattaacttagttatttgtatattgagtaaaggtttttgcttttttcagaataagccaaaataaatatttaatcgattgtgttttcttttataatgatagctctatttgttttgttagtctgactcttcttctccttcttccccttccccttcccctccctctccccccctcctccttcttccttctttttttcacagggatggttttagattgtcatctcaagaagctgcttctagttttggcgatgatagactactaatagaaaaatttattgataatcctcgtcatatagaaatccaggttggtacatttaagatgctttttcattattattttaaaataatatcatttaatcctattggaattatcttttcttccatttagaatgattgtgagttgtgcctttagaatctgttgtactttccgttaaagtgctaggatgttggttgggattgggaatgatacaaaaatctacctccaaaaaatgcattcctaagatagccgaccaggctaatctccttccaagactggaccattatagggcattttttaaaaaagaaaagtgcctgacctggactcctgtgctacttcagtttaccaaatgtccgtgtagcttgctgtgacaggtgttctgctaggagcttgttgtatagagatctgtaaatcatttcttctattcagtttaagatattcatccttaaagtggttacgtaggggcatagattttggcaaaacaaaatgggttttctaaaataaaacggggaagaagacaagtctgttgaagttttcatttgcctgttgaaaatgccttcatgctaattttatacattatgactatgaattgatatgtaatagctaaaattgataaaaacaaatgtcaaattagaaataatgaattttaagtatttttttaaatcttaatttggtgtggagagggaaccagataaataaaaggttatttgctgaccttatattttctgacaggggcatgatacaaaaagtcctagattctgtcagtttattccttaagtttaatggtcactttcatagatattatttatgggtggaaaatcatcatttcaatcctcaaattttctaaagtgagaaaaaatatccaaacttatataatcagttggatgttttacaacattgaacacagtttctttctgaggctagcaggctttgttttttgcctttttaaaaagattttctaaattgatatatcacatataatatctgtatatcatatatacggtatctgtatatcatatatacagtatctgtatatcatatatatggtatctgtatatcgtatatatatatatggtatctgtatatcgtatatatatggtatctgtatgtcatagatacagtatctgtatgtcatagatacggtatctgtatgtcatatatacggtatctgtatgtcatatatacggtatctgtatgtcatatatacggtatctgtatatcgtatatatacggtatctgtatatcgtatatatacggtatctgtatatcgtatatatacggtatctgtatatcgtatatatacggtatctgtatatcgtatatatacggtatctgtatatcgtatatatatggtatctgtatatcgtatatatatggtatctgtatatcgtatatatgtgatatctgtatatcatatatgtgatatctgtatctcatatatatgtgatatctgtatatcatatatatgtgatatctgtatctcatatatatgtatatatatatacagtgaaatccataaatcttaagtgtgcaattgaagacaatttctatacacacacatctaattgtgtaacaaccatccaggtctagatagagaatgtcccatcacaccacttcctagtcagtccctacctgtggccgccaaaagtaactgctgttcctatctgatgtcagagattagttcttaaattgcataaatgaaatccagtgatatagtctgtcacgtcttctttttcacacatcatcatatctttgagattcttccctgaggctctgttgtcctttgcttctaagaattgctctgtgatctcccattatttgactcacctgcagtttatccatattgttgttgatggatctttgggtttttagtttctttatattagaaataaattgctgtgtctttttatgaacatatatacatctctaggatagactgaggagaggtattgttggattacatagtaaggttatttttagttttagtgggtactctggttgtgctaatgtatactcccaccagaaatacatgagagtttccattgatgccacccctgccaacgtgtgatattttcaatttttgaaaacatttaaccatattagtggacttacgatggtatgtctgtttaatttgcatttcctggatgagtaatgatgttaagcatctgtttataagtttattgaccatttgaatggcttattttgtgaagtgacttctcaaactttcatccttgccttcctttttcaaattagatttttaaaaattactggagtgtccgagttctgtatcaattttgtttatgagtcctttgtcagatgtatgtatagtgtatccttctcccttcatgcggcttgcctgttcactttgataataatgtctttcaaagaacagaagttctgaattatagtgaagtcaagtttaagtctactttgtgtaccctagttaggagtttttttgttttaggtatgatatttaagtctgttactctcctttacttattattattttgtttgtttgatgtgaggcagggtcagagtaatttttaaaattctgatatccactttttccagcatcatttattgcagtgaccttttgttgcatattaagtgagacttcgtcattgtcttaactattttgcttttataataaatctagaaacctgattctgtaagtgatctaaatgtattgtttttctgcagatagttttcattctctttaggttctttgaatttccgtgaaaagtttagacttcacctgtcaacctgttccccctacggacacctacgcctacacccacccactcccacctctacctccactcccacacaccccatctgatgggagatttgtatttgggtcgtattgaatctagagattattctggggagaattgacatcttaacaatgttgaattttctttcttccctctctccctccctccttcgctccctccctccttctttctgacagaattttactctctctcccaggctagaattctggatattttgtgaaggtagaccagattttctaatagatggatgttatgtacaagaaaaaaaaataaggtgattttagggttttggcctaagaaatgagaagaatggagtgggcttttactgagataggaaagactgtgagatgtgcttgtttttgagggaggaaatcaggttataaagttggataaatcaaggttgaaatgcccattagatatctaagtgtagatgttgagtagacagttggctatttaaatctgtaatttaagggagatatttagattgtccttcttgtaagatcgtaggggcagaattaattttgtccttcactgtattccccatctagcacttgttcacactactggaagaccacttaggtaggctgttttatctttaactagttgaatttcgtaacaggccatgaggtccttaagggtagagagtaggtcttactcatttgctgtccccagcaaccagaccattgtctttgacattactaatactcaataaatgtttgttattttgtgttaaataattacatacctagatcagctttttagtttattttatttagccatggcatacagcctgggtgatatttttaaacataagtgaaaatgcctcccagttaataggccacacagatgttctcatatctcatctatacttagaagggtttttaatttacttttctttagttttcacttatttatattaagtaatttatgcacatgataaagggtaattaataaaaagtaagcatcccttttactctattctaagtcctctagtttctgtccctaaatgcaggcaccgttactgtttcttggctattcctccatacatagtctaagaagtatatgtgtgtatgtcacctattatttttcacatgagccattatatactatgtcctttccacaatgaaactgcactggtagtgtgaatggcacctctctttgtggcataaaccagtatttctcaaccagggcactactggcatttcctgggttgggtctagggataccaacaggcttgcattatgtgacattgtctattataataaagctttttcaggaagcagtatagcttagagatttttctacattcagtacgtgtaaacctataaaatttttaaaaaactcatgatgcatttaaggattaacttcccttaaaagcagtatttatttataatgttttctgattacatggcttcctcatttatttaatggaataaataatcagcaaatcatttttgttgaatgcctagtaagtgcacagaatttttaaaaaatgaactgggagactatacagaatttagagaagaacaaactcttgattctgtatatgaatctgatattttatagttggaaatatttctgagaattcttggttattttggctttatttcttggagactgtctacttttactttcttgtcaactagaatttaaaaagaggttgagagttattttaatgatttcaaatatttttagatttacttcatgcagccacctttgagtcttagaaaattccagcttattggcattttattgctgttatgttttccttcattgcttggaatcattcttgagtttcagaaagggtttgttcctaaaaattaactttacagtcatatattaactatttattttacattttaccaattatagccatgatctttatttgatttttttcagaagccatatcaaatattaagattgatattatctgctatttataatgcacaaagaaacagaatgacttgttcagagaagttgcatagctgtttggaactaaaattagtgcctggtctttgggcttctaaaacagatcttacctctgtaaacctaatatatgtattcagaaatataaatcaacaccttaaatctgaaaatagattggtccgtttctgaaaatcagatgttctaggcaaaaactttaatgaagagctgcttttgagtttccagatttagctgaaaaagatacatgttaaatttgaatttcagattaacaatgattttttaaaatcactgttccatgtagtacttgggacatagctagaaaaaaattattcattgtttatctgaaatttaaatgtagctggatatcttgtattttatctggcaatctcagcttattttccattacaggttgaatgtatctcttaactgaaatgcttgggaccagaagtgtttcagatttcagatttttttgggttttggaatatttgcatttatacctgctggttgggtatccctaatctgaaaattcgaaatgctccagtgactgtttcctttgagcgtgatgtcaaaaaatttcagcttttggagcattttggatttcagattttctggttagagatgttcaatgggaaaaactattatgtttgtatattaactccagacctttagcagtttcctagaacaaaaataaaccacagtacagacatccatagatagataacagattacatattgggtggaaatgcatacaatgtcatttcccaatcaacagacatttaataatgttaacatcaagcagatgtttgtaataaagctgcggtggcactcctcagcaacattgacatccagtgtttatccccttcactaacactcagtgtccttcacaaaatttgtacaactgattctgatgttttactcgttgtatttgaaaggtgatatgaacactttttcctcaaatctttttgataaaaatgttttattgagctttggagtaataaatatagttttcctttgttaacatgaatcaaaataatgttttgagaggtatgtatatactatgaagtttgaatattaaaaaccaagagatgttgcatgcggaaaatattaaccatcatctactttgtgggtgtggttatatggtttttcaaatggtattgctctttcaggttctaggtgataaacatgggaatgctttatggcttaatgaaagagagtgctcaattcagagaagaaatcagaaggtggtggaggaagcaccaaggtaagtctcctaagaaacatttataaagcggctgcttttatgcatttcattcattcattcattcattcatcattcactgacgcatgcattcagagacagggtctcactctgttgcccaggcagtggtgcaatcacggctcactgcagcctccacctcccaggctcaagtgatcctcccaactcagcctcccacgtagccgggactacaggtgtgtgccaccatgcccagctaatttttgtgttttgtagagatggggttttgtcatgttgctcaggctggccttgaactcctggcatcaaaagattagcccacctcagcctcccgaagtgctgggattataggtgtgggccactgctcccagccacatttctttttttatttgtttgctttatcagctacaattgcactaatgttcatgtagactctgttactgcatatttttataattaagaatttgttacttgatttcctcagtgctttaatgtgtaaaagggagagaatacttgaaaaagaagtgggtttttattagaggagaaagttgggtagacagccaactgtgacttctgcaggcttctaggaagtatggaacctgatggtacttcacgggatttctgagatatatgccttctagactttcatgttggtgaagggttcataaagttggtcctgaatttatcctaccatgaaaggcttctggagtgtggttcttggaaattccttgaattatcagagccactttgggtacttctccagggcatctttcatgagtttggtgtatggggcctcatttctcatttgatgctaggttgctatttgtatatactctggtattctctttgttcttaaaaatcctcaggtgagtgttcctagtaatttttaattaccagacggtaagaagtatagcttattgtagctttaatcagcagagctagcatatcttgatataatgcctatatagtttctgaaaatagtaagtgagaatgtgagtatatttttaatcccggagtaatggtaaaaattcaactctattttagttacattggtttttaaaaatatggcatggtgttattagttttaaaacatggaccccaaatcctttgccatttttctctttgagcagtgaggggaaggatcattgttcccttttcttgattctgtgctctgtgaaggcttgacccgtagactacttagaagtgatgctgtgccagtttccagcccaggccttgggaaactgccagcttccgcttcctgttctcatgggatgcttgtgcttacacaccagccagtatgctgtgaagaactgtgtagcttacataagatgtggccatctagttctcaaggcccaggaacaggatgtaagaagggaggaagaagaaaagccaaagggaatcctcttcctgtgtctttaggaagatcctggaaggtgctgaagctaattacttggtgttgatctgaagttagacacttagctagggagacttgttagtatctttttcttaagaaaccatgtgctgagctagaactagtactgtagtactgtagtatggaggaaggggaaaaaggatacctgtggaacagtaagagtcttcaacacacatgtcttgcaattttctgtttccttgactgattatcaattccaattcaattaacactctgtttttagtaaaaacctactcaagtgttacctgggatagaaatctttcccagactgggaaccttgaatcataaaatgtgtttgttttttctctttgtctagaaatacaaacttttcataatgaataccttatctacttatttagagaaaaaaaggaaaatatacagcagtaggaatcaaaatgaaaaagctagaactcatcattaatactgacctgatatgtatttgtacactgtgaaatgttaaaataaatggaatgtgtagttttcagttcctggagtaagaatcggctgggcatggtggctcacacctgtaatcttagcactttgggaggctgaggtgggaggattgcttgagcctaagagtttgagaccagcctggacaacgtagtgggacctcatcttcacaaaaaagtaaaaaatcagctgactgtggtggcatatgcctatagttccagctacttgggaggctgaagtgggaggattgcttaaccccagaggtcgaggttgcagtgagccgacatcatgccaccagattccagcctgggtgacagagcaagaccctgttctcccccaccccccgaaaaataaaaataaaaaaaagaatctactaatgtgctttgagggcaatgctagctagggtcactcatatctctggatatctagcagggcttttgaaaagggcaagggcaagatcaaataggagaaagatagtttcacagagctgcactgagattctccagatgttatgctattaattgttagttggggttttttttagttgcattaattttgtcagccagttattgttgaaatgtcatctatgtctatacattaggttaatgcaaactatattatagataattcataacacttgaacccattgatttattgtaacttcaccaaaagggagacagtaggaagtacacttcccacctgtgaactcttccccctcccccaccccaatccaacttgaatatattcaaggctctgagtctaactagcaatctatatgaaatagaaatgtaatatgaatgttaaaagacaccgtggggttgcatgcagttgaaccaagaatgtgagaaataagacagtaaaatgaccagatccttggccagaaaatggggaaggggcattacagattaaaagagtcttaagatacaaaagccaatcaaatgcagttttggaccttatttggatcctgattcaaagaaatcagctgtataaagatatttatgagatagagaaatttgaataccaagtggatattaaatgcttttaaggagttcttgttttttgtgtagttgtgttacaaaagggtactttatctcatagaaacagacatgtatgtttttaaaagtgaaatgatacctaatttgggatttactttaaaaacaataaagggtgggcctggtagagaagtgggcaagtagcatagataaagccagagtggctatgtattaataattgctatatattggaggcagcttcatgcaagttttttatactattccataataaagcttttatagcatgtcatctcaatcctgctcatttgagaataattttaatccacaagtagaaaagtagttaatgttttgtttctcagagcctttctttcatagaagcaaaatctgtgaaaatgcaaagtggtttgatgatatttttttcagggtttgttgaagtcattttagcttaacttgcctgcttgaaggtgggtttggtatcttgaagccaaacgtgcaggatttagtggatgtattgctgattcttgttatttgtggcagttatgttctctaaagtcaccttgattactgaattagtgaacactgaataatttcccctaggggaaatacagggttaggttcctgcgagcctttgcttataacattttcctcagtggattaatacataattttgttttttgtgtatttctcatttaatatctgtggttgattcattaacagtgaactcacaatcctggccaacaagactataacacgtgcctgagtaaagcttatcccacacacattttctccagacagtacttcatggccttcttgcacatgggaaccccagacagcacctaaggacaatgcttgatgggccatttcacaccatgaaatgacacacacacacacacaaatgcaaaaaaagtgacactaaacagaccttgaaaaggatgcttgttatagtatgagcattgaaacgagaagggagagcatcaccttgttcagccttagcatactggagtctcaaatttttcacctctctgcacttgttcacaaaggaccatgaaagcgccttaagtattgattttggggttacaaataaatttcagcaagtaggcagatttgtaaatatggactacatgagcaatgaggattgattgtgtatgttagatactaataagttatttttctcccagtttttggctcgaagcaattctgaatatatatgttaaatattagaagttgaagagtagttatatattttgtgaatggattgaagttgcagagtaatgtgaaaagttcaaatgttttatacaaatctaaagttgacttatttgagcatgttatgcttaataatatagtcaacatatattataaaacatatataaagcacaatattttgaattcttaaattggtatagatgatctatatctgagtaaactttaagaaaatgtttatgtaatgcacacaaaagataacttgatttttgtccgaaatgtagacaaacatttttttgtatatgtagcatttttttggatgcggagactcgaagagcgatgggagaacaagctgtagctcttgccagagcagtaaaatattcctctgctgggaccgtggagttccttgtggactctaagaagaatttttatttcttggaaatgaatacaagactccaggtaacaacaactgttatttattcctctccatgcctctgtactttacccttccttctccacccttttttgttttataaatgttaaaaaattaactccataaagtgttaaataaagatttagtttttatgcttgtgctaagacatctgttaggaatgacggatagtatccctctaaagttcaatgtctagacctctgctttgtcactgttaatactttatgttggaaataccactttgtttttttcttgaacctttctagatgaactgtatttgtcagtgtgtatgtgctgttaagaaaaattactctagatattacaaataggaagtgatacagtgattgcaaaatctttggaaggatggaggaaggaagggtacccagagtgaacttcggtggtgactcccactgctgtaccactcagccaggctcccagaggaaccggcacctctgccacagtgaggacgttgagaatcaagtggctgcccttggaactgttggctttgggggacataacttccttagttctaaccaaatctcaggaagcgactggcgttgtaaccggtggctttatttccttccttcttcccttttttctttcatttaaattgtgaactatacagaaacatacatagaacacaggtgaataattgaatgtattattataaagcaaaaatcaatgtaaacatcaactgggcctagaagtatttacaaaacagccagctctttttacactagcctcattttcttctccttctcaatgattctgattccccctccatcttccctagagctgtctcctatctgactgacttctcagaaccttcagttttcatatcattcttcctttgaattacgcatacctaagcagcattattacttttgtttgttttttaaaactatattaatgggatcgtatagtattcgttcttttgtgcctggcttcttttttcagcatggcatttgtgagatttgtgctatttcatggaactcctgtatgatacattttctaagaaaatgccactatttctttatctgttagatttctgtagatagtttatttccagttttatggaatttgtgttagtttgctaggactaccataacaaatgatcattaactatagcttaacacaacagaaatttgttctcgtacacttcaggaggccagagtctatcatgcaggttccagccgagtgggttccttcctggggggttggagggagaatccactccatgcctctctcctggttctggtgttgccgacagtccttggtgttccttggctttggcagcataactctaatccctgcctcagttgtcatattgccttctctctgtgcatctctgtgcccagggttcccgttttctgtagggacactagtcacattggattcaggacccttcccatttagtacggcctcatcatacgtgatttcctctgccaagatcctgttttcaagtaaggtcacagtcacaggttgtgagtggatgtgaattttgacacgacactcttcagtccaattcaccattcaaaaaacacatatggcctacagagataaatagattagtacttgcctaggactggggtgggtgagtggggggattatgggctgatggctaaggggtggaataggacaggagagactgaggaaggcatacttatgcctgaaaacagtgtcaactcttcttccgttaggcccttgggggagggggtggggggggagggggtgttgagtcactgcaggcatgagctgggtcgagcttaagccttcctgcagtggttttctcacgtgcaccaaggggccgcttgtgggatttctgcatgcctgcttcatcctgagcttgagggcttgcctctgaccctgtgcttcatgggagccgtgtcttcatgcctgtgcctctttcccagagggagactcctgtgggccctggttagccctaccatgggtgcaggagggctgttttctgttcgctgtgccgtggcggtagaccgtccttgtgtccttgaactttgaggtgagttcagtagtggccctgctgctccccagccgtggggaagctgatgttctgggctccaggtggatttctgcctctttcctgatggttatcttttgcgtgctatggctttcttcatgcttttactctcgacctacctgtttgaagacagttcacgtgtgcctctgtaagcagtgtataatttttcagcccagtttgatatgtttgtcttgtatcttgaccatttgctccttagaaagttgacagaaatgctggtatttttgagtttaaatttctaatttttaaaaatgttttcttcttgtccaatctctggcctttttcctttttttttctttcttttgcagtatttatcatttaattttttcctgtacaagtttgggggttataaatactgctgatcttttggtagaacctctacattacaacacacatccttaatttatcaaaaactgataacagtgtcttttcacctgagctgccagactgacaagggagcttagaacatttaaagtccgtttactgtctcctgacttgggtacaattatcccccgaggccatttctcttattattttagtcatcattcattccattcctcccacatatttacctttctttgtctttgtttctggtagtttcttttagaggtttacttgggacaatctctttttgttgacagccaatgactttatgttgccttgttcatgaaatgcgtttttactcttcttagacgtcttggctgtgggccgtggctcacccctgtaatcccagtgctttgggaggctgaggtgggaggatcccttgagcccaggagttcaagatcagtctgggtaacatagtgagaacttgtctgtaccaaaaaaaaaaaaaaaaaaaaaaaaaaaaaaattagaaatcttagtttggccagtatttttttcaatttattgaaaatattatttcactgtttctggtgagacttccccactcattctgcattctgcttatttggacataattgatttttccttttggtagcatttattaatttctgtttttgttagatttcctttaactttttgctgattcgtgtacatgtatacatggaattcattgaatattttgtctgtagattaatgtcttttaattttttttggaaattctccaccattattacttctggaacaatctcacatacacagatgaataaacctataactttcattttagacctccttaatatatctcttatgtttcttatgctctctttgatatttttcatcttttttggataatttcttctgtctttcttaccttcccttatgctgtatttaattaattaatcacccattgagttcctgatttcaattgtttatatttcagttctgaaatttctatttggttcttttaaaagtatgattcattggtttttatcttttcttgtctcctatttgaattttcaattttgacttttattttttgaacataattaacttatttgttttgtagtacatgtctgataatgttgacatgtgaagtcttatgactacttgtattaactgctttttatgctgtttcttggttctgctgttgagttcctgttgggccttgttattatactgtcatatacagttattttaaaaattgttattaatcaaaacctaagatgatggattctttcttatagagatttttcaaatttttttctgccacatgcctatggacagtagtatttgtgactacggcaatctaagctcaaagtgtaaggctccttgaactcctgaggggatacacagcccggttgcagttctagagaatggttggttttattccagttcagtcttatcttgaggttgcattcctttatggtgcccactaaaagtgggggtagtttatcaaggttctttgataaactgatactttggtggcctcttatcttcgtggttatgcttttgatttgttgatgccaccaaaagtatagcttatattcatagtccttttttcctggaatggcaaatgacgttagggcaaaaatggtgttgagtgttgggtttgcaaatctgtgttttcatcttggttttggctgatcccttcctatattcttaccctgtgatgtttttaagaagacctcccccatctcccattccccaccagttgttttctagtccccaataagcccaagttccaagctgagtggctttagaggtacattatgcctatagattaaataagtttgtgtcctgactctcaacaccccccaaaagcagtgagcgggcagtggaatgacagtctgtgcctcactgctatctcacttttcctttccaaatctcatgcatttgcacatccagaacctcatgcagtcacatggaaacctcagctgtaagggagtctgggaataggctttttaaccatctgtattctgcagtgtaagagtataccctagaaggagtttggagggaaagttcagtgccagcccaccattttcacatgaatataatcaccaaaattttaatctgtaagttatatgtaaaaagttaaaaacattgctgtattttcattgtaaagtataactgtcaaataatgtggctgattttccttaagtatggcaaaagtgatctatctagatgcattttgagactagtattgtaaatacttgtagcattttataggtagtagctcagtagttgttgcttaaaactcatacttcctttgaaatcacctttgtagcctatattttattttgtgactatctttagaagtgacagaattttgccttttgaaggttaatttgattttgattaaaatgtatctttataactaagtatgtctaattagattattagctgggaaatcatgtttttggttaaagtgaagactttattttgtcataatgagaaaaatagcttgtaatttgattctgaagacaatttgagacgactgcaaaatatttgtattctattctagaccaaagagatctgagattttttaattgaggtacttatcagtatttatggaattgacaaatgggcagtttgttattctgttcttgtgttatctttttttccatttgtttctggctcatttatctcaggttataagtttgttcaagtttgtaccatggttgtttctggtataaaacccgatagttgattttttttttttttttaaacagagtctcactctgtcaccaggctggggtgcagtggcgtgatctcggcctgcaaacctccgcctcccgggttcaggcaattctcctgccttagcctccagagtagttgggactataggtgcgtgccactacgcccagctaatttttgtatttttagtagagacagggtttcaccacgttgaccaggatggtctcagtttcttgaccttgtgatccacctgcctgggcctaccaaagtgctggtattacaggcgtgagcctccgtgcccatcctgtagttgatatttttatcgaataattctatgcagttggtcaagactatctaagtacctatgttttgtgtattggatagcttgctaggaaattatgttctataccctcaaaaaattataaaaatatttcaagaaaaaaaatcaaattcacaaagattttgtcatattaccagatctaatatgacaaaaattgtgaatcattaactcataatgatatgaatcagtgctatagaatgtcatgtccatgttcggcctgaaattgccccacttctcaccggtggtctgggccccacactgtgagaaaatatttcactaatacctgcgcttagcaaacgtcccaaggtctctgactgattagagctcttgttcacgaacagagctctgatagtacctaatgctgttaagcgtgctattttaatagcattctatgatatttaacatcatactttgagacatttgtctcccatgtagtgtttaatcatatttttctctcttgtggtttacttccagtgactgtgatcctgtcagttaccagaataagttaattttaattttttagaatgtatctgtgtgatagggggtatttgatgtggaggatataattaaatgggagcatgaacaaagaattttggacttcatatgtgttcagaaaactattcttacatattccaaagatttctttctgatattgtttaaacaatccaatttgtttttttttgagacggagtcttgctctgtcaccaggctggagtgtagtggcacgatcttggctcactgcagcctccacctcccagattcaaacaattctcctgcctcagcctccggagtagctgggactacaggcgcataccaccacgcctagctaatttttgtttttttagtagagatggggttttaccatgttggccaggatggtctcgatctcttgacctcatgatccacctgcatcgacctcccaaagtgctgggattacaggcatgagccaccgcgcctggcccaagtgttcttttaatagtagacattctctttcaaatttctttactaaccttaaattataatacttaaggcacattcaccaaattctttatctcccaagatatatgttatctctaattagtgtttcagtttgaactagagggctataattttctttgttctttttttattttctttgaaatttcctgattgaactttcactttttccagcttcagaactgtgttttgtttttgtttttgttttttttttttttggtaacagaaatgcatcttcactttctacattttcttaagagtgaaatttgaaataacaatacagtttctccataaagagatgcaacactaagaaagtcaccgcgtttggtgcattaatagttggttccgttgactggttttgttctcaatctggtcacagtttatgtaactgaattacctttgctatcttcacatatttttgctttattttttttaagtcactggttttctgttgcttaaagataaaatttaaatgcttttgcatcacaacacaagcttttttttttgtagccctgatttttcccccagagtcctgtttcttgccagtgccgatctctgtgtatgaattgcaagagactcctttctttttcctgaaggtgcctttcagtttgacttctttgtgccttgtatcatgccactcccattgcttggaatgttctctgttcacctctcacagtgaacactgagctatgtatctacctgcacacccacaccacacacacctgtctcccctctctgaccatacttctccctcatctcacctctctccacatttgaaagatggacagctagatggagaactactctacggacactaggattttgttaaaatgctattttattgaagtgtattctagtagtcccccttatccatagttttcctttccaaagtttcagctacacacagggtctacttcatttcaaatatattaaatggaaaactttagaaataaacaattcataagtgttagattgtgcactatcctgagtagtgtgatgaaatctcacaccatcctgctccatcctgcctggtacgtggatcctctctttgtctggcatctccatgctgtagacactccctctccatgagtcacttagaagctacctcactgcaatgagacatgatggtgccactgcactccagcctggacagagcgagaccctgtctctgaaaaacaaacaaacaaacaacaacaacaagaaaaaacagaaggaaaaaaaaatccgcctcggtgatcacatcgactgtatgatacctcagtgcttatgttcaagtcacctctactttatttcataatggccccagcatacaagagtagtgttgctggcaattcacatatgccagagagaagccataaagtgcttcctttaagtgaaaaggtgaaagttctagacttaataaggaaagaaaagagtcatgtgctgaggttgctaagctctgcggtaaggatgaatcttccgtcggtggcattgtgaagaaggaaaagaaatttgtgctacttttgctgtcaaaagtcaaacttcaaaagttatggccacagtgcatgataagtgcttaagatggaaaagacattaaatgtgtgtgtataagacatgaatagaaaagtgttctaattgacagcaatcatgttctatactatccacagtttcaggcatttgctggggacctaggaacatgtcccccaaggataaggggggactactatatatgcaatttgctgggataattttagtttcttattttgttgaatggtaatactcagaatttataatactttgtttaaaaaaatctagtggttcataagagtctacaatggaaaagttactctccataccacacttttatcacagccatttatttttcctctgttgaagcaacctttgttttttttaacatactaatttgggagtattccatgcctaatttaaagcattatctttttcattttaatgacttctaataacctgtcatagggatgtaacagtcatataatttcaccagatctctatcgataatttttccagtattttgctatcccaaataatgcaattatgagtgaccctttatatccactttgcacgtgcagaagtagaattgctgggaatatatgtgcttttataaattagttaagtattatcagtttacctcttaaatgagagcttgtttcttctctccctggccaaaagtgttttttgccttttgatctttgtgtgatagtgaaaaatggtatattgttttcattgtttatcatgaatttttctttatagattcatttatatttctgtgaattgactattagatcctttgccctttgggttttcttattgatgtgtaggtatttgcttattgttgggggaaattagccctttgtgatattgtcagaaaggaggggctttgtgaatattttcatagggctacagggcaggtgctttctgagcaaagaccctggcagttgtgagaggtgacagcgtgctggcagtcctcagagccctcgctcgctctcggcgcctcctctgcctgggctccaactttggcggcacttgaggagccttcagcccaccgctgcactgtgggagcccctttctgggctggccaaggccagagccggctctctcagcttgcagggaggtgtggagggagaggcgcaagctggaactggggctgcgctcggcacttgcgggccagctggagttccaggtgggcgtgggcttggcgggccccacactcagagcagccgggcaatgaggggcttagcacccgggccagcggctgtggaggttgtactgggtcccccagcagtgccagcccaccgtgctgcactatggcttggccccaatattttctctctgatggggaaaaatggccacctgagggaagtacaaattacaatactatcctgcagcttgaccttttctgtaagagggaaggcaaatggagtggaataccttatgtccaagctttcttttcattgagggagaatacacagctatgcaaagcttgcaatttacatcccacaggaggacctctcagctcacccccatatcctagcctccctatagctccccttcctatgaatgataatcctcctctaatctccccccgcccagaaggaaataagcaaagaaatctccaaaggaccacaaaaccctcctggctattggttatgtccccttcaagctgtagggggaggggaatttggcccaacccgggtacatgtccccttctccctctctgatttaaagcagatcaaggcagacctggggaagttttcagatgatcctgataggtacatagatgtcctacaaggtctagggcaaaccttcgacctcgcttggagagacgtcatgctactgtgagatcaaaccttggcctttaatgtaaagaatgcggctttagctgcagcccaagagtttggagatacctggtatcttagtcaagtaaatgatagaatgacagccgaagaaagggacaaattccctaccggtcagcaacccatccccagtatggatccccactgggaccttgactcagatcatggggactggagtcataaacatctgttgacctgtattctagaaggactaaggagaattagaaaaaaacccatgaattattcaatgatgtccgccataactcagggaaaggaagaaaatccttctgccttcctcgagcggctacgggaggccttaagaaaatatactcccctgtcacccgaatcacttgagggtcaattgattctaaaagataagtttattacccagtcagccacagatatcaggagaaagctcgaaaagcaatccagggccctgaacaaaatctagaggcattattaaacctggcaacctcggtgttctataatagggaccaagaggaacaggcccaaaaggaaaagcgagatcagagaaaggccgcagccttagtcatggccctcagacaaacaaaccttggtggttcagagaggacagaaaatggagcaggccaatcacctggtagggcttgttatcagtgtggtttactaggacacttttaaaaagattgtccaatgagaaacaggctgccgcctcgtccatgtccactatgccgaggcaatcactggaaggtgcactgccccagaggacgaagattccctgggtcagaagcccccaaccagatgatccaacaacaggactgagggtgcccggggcaagcgccagctcatgtcatcaccctcactgagcccccggtatgtttaactattgagggccaggaaattgacttcctcctggacactggcacggccttctcagtgttaatctcctgtcctggatgactgtcctcaaggtcccttaccatccgaggaatcctgggacagcctgtaaccaggtatttctcccacctcctcagttgtaattggaagactttgctcttttcacatgcctttcttgttgtgcctgaaagtcccacacctttattagggagggatatattagccaaggctggagctattatctacatgaatatgagaaacaagttacccatttgttgtcccctacttgaggagggaatcaaccctgaagtctgggcattggaaggacaatttggaagggcaaaaaatgcctgcccagtccaaatcaggttaaaagatcccaccacttttccttatcaaaggcaatatcccttaaggcctgaagctcataaaggattacagaatattgttaaacatttgaaagctcaaggcttagtgaggaaatgcagcagtccctgcaacaccccaattctaggagtacaaaaactgaacggtcagtggagactagtggaagatcttagactcatcaatgaggcagtaattccactatatccagttgtacccaacccctataccctgctctctcaagtaccagaggaagcagaatggttcacggttctggacctcaaggatgtcttcttctatatttccctgcactctgattcccagttcctctttgcctttgaggatcccacagaccacacatcccaacttaggtggacggtcttgcccaagggtttagggatagccctcatcggtttggtcaggccctagcccaagatctaggccacttctcaagtccaggcactctggtccttcaatatgtggatgatttacttttggctaccagttcagaagcctcgtgccagcaggctactctagatctcttgaactttctagctgatcaagggtacaaggtgtctaggtcgaaggccccagctttgcctacagcaggttaaatatctaggcctaatcttagccaaagggaccagggccctcatcaaggaacgaatacagcctatactggcttatccttgccctcagacattaaaacagttgtgggggttccttggaattactggctttggccgactatggatccccggatacagcgagatagccaggccactctgtacgctaatcaaggacacccagagggcaaatactctggtgggaatcagaggcagaaacagccttcaaaaccttaaagcaggccctagtacaagctccagctttaagccttcccacagtacaaagcttctctttatacgtcacagagagagccgggatagctcttggagtccttactcagactcgtgggacaaccccaccaccagtggcatacctaagtaaggaaattgatgtagtagcaaaaggctggcctcactgtttaagtgtagttgcagcagtggccgtcttagtgtcagagactatcaaaataatacaaggaaaggatctcactgtctggactactcatgatgtaaatggcatactaggtgccaaaggaagtttatggctatcagacagccacctacttagataccaggtgctcctccttgaaggacccatgtttcaaatacgcacgtgtgtggccctcaaccctgccacttttctcccagaggatggggaaccaattgaccatgactgccaacaaattatagtccagacttatgctgcccgagatgatctcgtagaagtccccttaactaatcctgaccttaacctatatactgatggaagttcatttgtggagaatgggatacgaagggcaggttacgccatagttagtgatgtaaccatacttgaaagcaagcctcttaccccagagaccagtgcccagttagtggaactagtgcatcaccctctcaccctccctctccccaccaccaaaagttgagaaggggcagatatgccagcaactcttctacaagctctaattttaatagtctgagctttcctttccagatgtgcatacccctctgcatgtgtgtgggggggaagcaggccattaactacgctgcctcatggggaagtggggtatgaggaacgggactaagatgttctgtgagtaaacaattgcactgatctatgattcagaaacctttttatttttaataaaattttctttttaattgtcagcaaggcaagttatttctatagaagggtgtgcccttacagatggagcaatggtgagcacacactcggacaagggaggggaaggggttcttatccctcacgcacgtggcccctgctgctgtgttgttcccctgttggctagggttagaccgcagaggctaaactaaatccaattggctaatttaaagagaatgacggggtgagtgctttggcgggagtcagggcagagcaggtagcaggtgatcggaatgagttagggtggagtaggtaactgaaaaaggttgctttacgaggaacttaagtttaaaagtagaaggcaacgaattgaacatattgacatattaattctttgaaacgaaatttagaactcatatctaacaacccctccccttgtatttccttacagctttcttttcaaacttttttttaatgtgtcttggcttagttgttttgcttgattttccaaaagaagaagcttctctggataaggtggaggatagttaagggaggagaaaccttttttttttttttaatgtcttggcaggattaacaaatactcgtatgaaaacataacagatatgatttgtaggtatttttccttatctattgcctttttaactttgtatgtgttttttcttcttgtatagaaagtttttatttgtatgcagtttaatttttaaatcttctctttgtgatttcaggagtgacatacttaggctttctgtgctctatgagcaatcaaactgttttctttcatgttttcatcaaatatttcatctttaatggtgaaatcttcacttcatttggaattcattttattttattttccaatggctacctgattgttccaacaattattgaataatcagtcttttctgtaataattcgaagtgctatctacattacatactgaaattgcagatgtatgcagacctattacttcactcttctttttttaatttttctgcttattcatctcctagcaccacactggtttaggtattatagctatatattatagtacagtatctagtagaactattcctttctcattacttttatttttcatatgaaaaattagcctatagattagcttattgtatttatatttaacagaagaaaaagaaattaaaatgacagaatctctggactattagataaatgtttataactttccacagatatattaattcctaaaatatgttctttttttcccttccagtgacatggaactaaaatatgttcttaataagaaaaatggttatgaaaaacatttatatttttgtcatcattttccttcatatttcaatctgaaagagtatattgtttctcttttacaaaagtaatggaaattggcatacttatatttaatcccgctgtctttacttcctaactcttcatgtttgctagttttattattagttctatgtgattgtagcatttcctttcttttctgtaggcatggctctcctggaggtttcatcttacttgtgtattttatcactttatggtcactgtcagcatcttaccatagcttcatgattagtgagttctttattttgatttgttttatataaagttagggggtttttttaatcaagaatttattttttagagatacctgtgggtagtgtatttgaattcttagatggattaaataaggttacccttatatttgaaattttaactcagatgcaaaccgtttgataccttcacaattgtaggactttaaacatctttctgtggtagaccttcagaattttatgagggagtatcaaaatttaagattatcgattgttttattcaattcctctatatatcttttctttttccctttaaaaattgaatctgtttgattaagaaagagatagacggagtttttatcataattttaaaaacgaactttatttgttagagcagttttgggtttatagaaaatctaagtacacagaattcccatatgcccctccctcatgccacaccatttctctacttaacatctcatattagtttggtgcatttgttacaactgatgagccgttatcgatgcattgtgggttttttgtttgtttgtttatttttagagagaggggtcttactccaccacccaggctggagtgcagtggtgagatcctagctcattgcagccttgaactcctgggctcaggcaatcctgccaccccagccgcccaggtagctgggactacaggcatgcatcaccacgcctggctaatttttgtattttttgtagagacgaggtttcaccatgttgcccaggctagtctctaactcttggggcctctgtctcctaaagtgctgggattatagccccgtgccagggcacccggcgatacattgtttttaactaaagtctgtagtttacactagggttgctctttgtgttacacattctatgagtttggacaagtgtatctaccattatggtatcataagaataggttcattgcctcagaaatctttgtatccaagacacctttgcatttctttccttctttccttgtttggttctttctgtctctcttctttcctttcctttttcccttcttttctttcccttcctccttccttcttttcctttttccctctgtgtgtctgtctcactttcttttcctcattgtaattttcacacatacagaagtacttcagaatagcaacagtagtagagtagagccctaggaatctgcaaccagcttcttatttacttcccagtgttgtttcacgtatgccttcttttcctcagttgttcctctcttggctggagtatcagacattatataaattcacatcatactgaagtatatgtctttaagttttccctacattcctaataatgcatatttttaaatatttatatacagtataatttgatgtatgtgggtttatgactcttgtacatgagttatgtggctattttcttgcctgaatgtttatcttgtttaaatgtttaatctgaaatcctactttgactcatgtcatactgtatctcctcctgttttgtctggtcctttattttaaagccttctttattagttgttttgtttttttagtttagaaaaaattatgtgtgtatgtgtatttgtatagatggggtctcaacatattgcccaggcttgtctagaactcttgggctcaagggatcctcctctcttggcctctgaaagtgctgggattataggagtaagctgctggcgcctagcctgaaaaaattttctaagaacctaatccaacattttcttttagtgtgaaaatttaattcttcccattttaaatacttgattttatttattttatcttatatttaaaaattttttttcttgttttccattttgtttttccttttctgtttgttgcttgaaataatggttaattatcccttttgtttcccattgataatttggaaatcctattgtcctttaaaattttatttatgtttatttttctattcagacagacgttttctctgtcatttgtaaagatgatgtaactagtttccttgactttccaacactgaagatttgctaagataatttaatacttctaagctatttttagtttatctcttcttttttagcttttttttagctcccatgtatacagcccagacacatctttcattatttgctatatcttcagctttcttttttgagatttctgccctagttcacttatttgtgtagcacattttttcatgaaatttcttcagtagaatgtgtggaatatatgctctgaaatgtcacatcctcaactatgtttctttagccctgaacgggggatactgttttgattgaatacaggattcttgattaggattgggtttcggttcttgtctttcaggagcatatgaatttcagctgtgttctagcttctagtattatgtctggtgtcattctgatttctttcccattgtagataatgtagtcttgctgtctgaaagtttgcccaattttttttatttctctctctctctttttttttcttgagacagggcctcatcctgtcacccaggctggagtgcagtggcatgaacctggttcactgcagccttgacctcctgtgctcaagcagtcctcctgcctcggcctcctgagtagctgggaccataggtgcatgctgccacgcctggctaatttttaaatttttttgtagagacgagatctcactttgttgcccagcctggtctcaaactccaggtcttaagtgatcctccagcttggcctcccaaagtgctgggattacaggcatgagccgttgtgtctggctctaattttcttttgatcattggaattcagggacttttttttccaaccaggatatgccttggtttgtgtttgtatacattaaccctgccttttagtccatgccctttttcagtgttcaggtttaagtattgcttcatttcagaggaagtttcttctgttatttaactatttccttccatcagcaattttctcctccttgtggaacttctagtttttgcaatttaggtctactggatatgtttctcttatgataactgtcattttatatttatgctgtgtctcttgacattatttctttattgatcttccaggttactaattcaggttgcaacagtggttatcctctcctataagtaactgactaaattgtgcaattgggaaatcacattattttagctcagaaattctaattgtgcgttacagttagccctccttacctactagttctgcatctgtggattcaattaactgtggcttaaaaatttaaaaataaaatgaaaatatcaattcaacaattaaaaaataccaataaaagcacaatatagtataacaacagtttacatagcatttacattgtattactataagtaatctagagatgatttaaagtatacggaaagggctgggtgttgtggctcatgcctgtaatcccagcacttttggaggctgaggcaggaggactgtttgagcccaggagatcagtgctgtgatgaaccatgatcatgccactgcactgaagctgggatgacagagcaagacccatttcttaaaaaaaagaaaagtgtacgggatgatatgcataggttacatgcaaataccatgttactttatatcggggacctgagcatctgtagagtttagtattcacaggggtcctgggaccaatcccctggggagatggaaggaggactcaggggatgtgtgtgcacatgcacatatgtgcattgctacttcttaagtttttaagtgcctttactgctttttgggcaaagttgtatttttctcctgtccttcagcagctctgtttcacttggtctgtgtaatcattattctgaatgttttttctttcttgtgctagtaatccccctgctgtggttttttgggggttatcagtactaagttctgcttcttgaaatattctaagtgacagcagcccttcagatggttgaagacatgaccatatctactccagaggcctggaagagcatatgtctcctagcattctcatctcaaggacagaattgagctaatttttattgactacttggattcctgggcaaagagaccacggacccatctggagcctttattgacttttcccctgaggtccatggctctttgcaagccagtctgtctccatgatgtgttcctttcacattcttccctagagttctctgaagctagtctccagttttcgttcagccacagagggagaagagcctgttcccagtttttggctctcatcttctccctagatcttggtgcttcccatgtcctcagctgcttagtaactctgggggagatagacagcatggagtttggagtggagaggtgggagccaggctggttccaggctgtttttgacagcttctcagagcaggaatagctaacctgggttatctggatctctcatgagctttagggaagtctgtgaaccctctgaagtcagatatatagttttttagtgagaaattcagtgagattcaaaattgtaaaatgtttcagaacaactgcagctgactaatggaggactcatttaatcattgtttttgttaattgcaaacatctactgttttcactcagagcaagtaaattctagttctcttccttcttagctgtgtgaccataagcaagttccttaacttctgtatgttttgatttcctcattagtaaaatgacattaattatagcatttgctgtataggattgtcagcattaaatgagtttatatagtttacaaattcaaaatagtacctggtttatactgagcacacattctttctgctaactgtgagtatcttatccataacatttgcatgctgtttattatatattggttgacatttttactcttactgttgtcattattattaacattattgctattactattgtcattaatataaagcctgtctgacatctgaaaagatggcaagccacatattaaataataactttctctcattcttttgtcagttaactgcaaaattattgttacatgtgaacaaacatatttgaaatattaaccacttttaaagagatctcctttctgttataagggtgtttgtgtaagaagagtctgggaggaaaaatggaaactgaaatcttccaaaaatgaagctgatagagaaaagtatttactacatggcttaggcctttgtgttaagattaatattaggaccctgaatacacctttccaaattcgtgtgtgtgtgtgtgtgtgtgtgtgtctgtttgtgtgtgtgtaattaataatttccagatgctaggtttttttttagatttaagtgttttggaaaagcatcctctgtatagtctacaaagtctataggagttagaaaattcccaaatagagaggaataaaatcttaataagtaagtaattaaaaccccaaacatggtcagtcagctgtccatatctttgagaacagacaggtaaactgtcccacttttgttagacttagtcagttgcttatgttgattggtacagtgcaggaggaatctacttttaccatggaaggaaaggtacagtacaattgttgaaattctgtgaaggctatacactctaatctcatcagggggaattctgcatcacagggaacctttatattccagaaagattttagaaatttttttgtaacttgattttgccctttgccatttgtttaaaaattaagaattattgcaacctaaattctggtttataacaattaactataattgaacaaataccatattctaatttcagactagttttggattaaaaaaaaatttctagacctgccagatgaaaatattttggtcttttatggaattggagtgtttgatagaaagaatgaggagaaattattgggaaaaggatttctaactaattgtaaaatttcattcttgtcagaaggggcattttggatgtgagcaaatgttgacctttttgattgtatttaaaatgatagaggccagggctctcaggctgtttagagtgagccagaattgggatgttttggcatgttttgttctgggaaactgaggatagaaggtaggatgtgttataccctcccttattatttactgaaccttagtagaaaatgaaggaaagaagtttttggtatacagatatgtatagataagcttttcaggcacttagatttggggttttgttttaaagcatattgtaaatgatattgctgtctgagttctggactctttttatctatgtttaactttttaaaactggtctttgtattagtttgctagggctgccataacaaagtatcatacactggggtggctgaaacaacaaaaatgtgttttctcaaagttctggaggctggaagtccaaaatccaggggccaacagggtcagtttcttttggaggcctttctcgttgcttgtgggtggccatccactccctgtgtcttcctgtggcctctcctctgtgccttgtgttgtctgggtcctgatcttctcttatgaggataccagtcatgctggattagggcccactctgatgatctcattttaacctgagcacttctttaaagaccatgtctccaaatacagtcacattctgaggtggtggggctaggacttcaacatacgaattttggggggtacacaattcagcccataatggtttccttatcatttcttcatgtgattattattcttggggtcaccaggggaaccctataatagaatctgttccgttttcgtggtcactcttttttttttccatgtatacatagcatataaaaattttaaacaacttactagaatatgactggttctaaaaatcctatctcccatccccccaaaatgaagacttgacaccggttagtctattctaaacattctgatttcagctccaaagtgaatttttaaggacaagttccagaaatgaattggcagtggtgatattaaatgcatatttagttttccaagatgagctggaaaactaaatttttagtttttagtgctgttggactatttaggaatagccagtactcactttgatgtatagttctgatgttattggcaaaaataaacaaatcaaaagcacaaaacaggcaactgacaatgtcatgtctctgaagagcacatctgtatataatcctacacaggtatacgcaccttcatccatctattctaagcacgaagaatgtatcagagaaaaggggagaaaaattggtttctaagccctgcagtccaactcttttttttgtttttttctgaggtagagtctcactctgtcacccaggctgtcactcttgaatataaccattgtttccaaggtgagtttataggagtgatgtgttggggcttatttcccaacatgcttttcatccttgagtgctgtggatcaaaatctaataaccttagatctttattttgaaatcctgtattctcaggaggtagagcttcagaattttagtaggtacatgctagattctgttccgtgaacagaaagagcagaatctttctgaacagacagagcagaaccaaaaataatggcattgaccatcctttcaggctggaatagcaacaaactacaaagacagaggcctattatgccaaacacttatgaaactgaattttatgtaatgggacagtttcctcatatttcagtgggtaatcatactaaactactttgctaagttgaatccaacaagttctgcttacaaaagatagctttcgaaaaaacaagtctttgtaatacctgtcagtttagacaggatatattgaataaaaatgtcacttaaaattttgttaatttaaaagaacattattttgataacaaaaaatttcagcattctctcaccacaccatatcttgagagcaatctcctatgccttctctattaaatgacagtgatgtattgaagaagtttgtgcatgtgtggaaggattttgtaaatttcaaagtgccacactgatgttggttatacttaggtatggtgggccttacacttttaggggcagtttctgctttgactaagcaactgggccactacttaccagctgccaaataattagagctgcagatatagcactgttgaaggaattttaatacttctcatcagcctcctcctcataatggccaagttaacacacactgcgtctttctgacttctttttacatgttgtgacttttccccttttcccttaaaactgattttcctcagttttaattttcatttcaagtcaactcaggtatataattaaaatttccttgaatcttgctcaccttcaggatgacttgcctgttattcagttactgatcctgaaagttttagaaattattaggtaaatatcacagtaaaatatttaaaagtttaggtcagaggaaacatatcgcacaaactatctgctattgtataactatttttatttaacatagtgggaggattctgacaagaatgttggtcaagtcagatgtctttatttttaataatgttttataatatgaaaaacaagtctttctagggacactatttttatttttattaacttttttattttttatttttttgaggcagggtctcactcccatttcccagactggagtgcagtggctccatcttgcctcactgcagcctcgacttcctgggttcaggtgattctcccacctcagcctcccaattagcgggactacaggcatgcgtcaccatgcctggctgatttttttgtattttttttttttttaaatagagacaaagttttgccatgttgtccagtctgctctcaaactcctgggctcaagatatccacctgggtttttctcccagagttctgggattataggggtgagccaccgtaccctgacgtatttttcttaactttaaattttgaaatgatttcagactcacagaaaagttgtaaaaatattacaggtaatttctgaatacacttcactcatatttaccacatttactttatctttctatctatatctgtatttactggaagcatttcagagtaagttgcaggcctagtggccctttactcctaaatatgtctgtacttcctaaaaacaagtaaattttcttatgtaactatagcaccataatcaaaatcaggatttggacattaacatattactgtcttccaatttagggactatattcaaatttccccagttgcctcattaatgccttttgtggtaaaagaaaaaaaaatctggttcagcatcctgcattgcatttagttgttgtatctctttattctctctcaatctggaataatccttagttttttggtcagttgtgatcttaacattttttaagagcataaaccatttattttataaaatgtcactcattttaggtttgcctcttttctcatgtactagattcagtctttgcattctgggcaggaatagaaatgacactgtccatctatgagcaccatgttggtagcacgaagtgcctctttatcccattattggtggtgttggctttgttaaggaggtatctctggcgtttctacactgtagactttctattttccttttgtccttaataaagtatcttatagggagatactttgagactctataaatagccagcatactttcactcactagctttagcatacttcctagtttgtatttagtgaggaataggctgaagatgacaatggcagtgtcagagtttattattataatttttagaatcatgaggtaggtaacaacacagtgccaaggagatttagttttccctaagcttattctgctaccgaaatgagatacattaagcactcagagatgaagcacaacctaatttacctcacagttgcatttgacaagcttggttatattttgggaaataaatttgaagcaacagatgagtaagagggagtggtaagaggtattagacacgatgctaatagtgacagcttggtggtgattaagaatacaaaactaaaaatagcaagtagatctataaaaagctagccgattgttaccatctagcgtaggtgtatggagctaaacatatttattctagtccatgagggtgattatggcatgagatgttataaggcacgattatgtcctataatatggcatttgataattttttgtacctgtttgaacaaaagattcatggtgagctagggatataaccaatacaaataaatttatcaacaactgttagactctgcagtgtggcactcccttgagaaatttgtctttgaggattcaggtattataacttggtagggcttactccttttttgtgagtgtgaatttttttttttttttttgggttcgggcttactcttgctcactaaatcccaagatttatatattcacatgctaatacgttaacaatgcaaaacagtgctgtctggtggatccctgatttgtgtgctttttagaaagagcacattgctgttgggtaggaaaaacatatgaagccaggttctcaaatatttgtgtggtaaggatggagtaacaataagggaattccattttgtattttgaatgtttttgaggcattgtttccaaaagtgtgttccatggacttggcaactcataaaggtactttgcaaaaggaggaggaagtgctgcgcaaggcccttctctaggagagtcacaggacatatgggcatcctaatgacaagagtctttcctaaacaatctgttgaactgagattaacccggtgtttcccaaatagaagtgacacagaaaccttttccccccacataatagccctcaaaacagatgcatattagcatcagacttctgtagttacatttttcttctaagtgggacaagatgaacttgttggtttaccagacaccaatttttgacttttttgtttttttatttttataaccttttgatcaagttaaccatcttttccctccctccctccctcccctccctccctccctccctcccctccctccctccctccctccctccctccctccctccctccctccttccttccttccttccttccttccttccttccttccttccttccttccttccttccttccttccttccgtccttccttccgtccttttgttcctttatataaccctgttctatcacttaagtattgagcttaacttgcagagagaaaccattgctaagcacttgggaatagggggatatttgtgattatttaagcaatgttgtgcttataagatttctggtaataacacagtctaaaggaaatgcttcatatcctgtggagtagctttggaatcctatgtatttagaaggatttctttcaaaaatgtttaaaattataagttttactttaaagaagttaatttcttttacctggaaaattgaagcaagttagactattttgtggacttatgcagtacttgtcaaaaggtaaatgttttttaaaatttctgttagtaaggattttacctttagcagcttgttattttagttatctgcttagttgcttctaatttgaattacttgtagctccctaatttagattgtaaaatgttatggctctgttatatgacttaagtttagaacacagtgggtccacttttggatcccattcaaagtggatctgatgtacttattttcctacacagttaaagatccctcttcaaaggtgaagcagagacacaataaatttggatcttgaaaccttcatagtaatatgctttttaaaagacatgtatacataattgtatagccattgcatatacttttatacatacatttctttcatatacattactgtcaggaagatcaggaagataatgtcatctctttagtgagataaattccaactccatcgtgaccacttaccatagatgtgactctgtatttgctgttcattcattcaatatgtatttatttgccttgtatatagtatgtacttatatgggcactggtcatagaaagaggaaactgaatggttcacttaacttttgaaattgtcttttcacctatcagggatgtgtgaatagtattgatgtaaagcacttggcacgtggtaggttcacctcttttttttttcctgagatggaatatcgctctgttgcccagactggagtacagtggtgcaatctcggctcactacagccttctcctgggttccagcaattctcatgcctcagcctcctgagtagctgggactacaggcatgtgccaccacacccggctaattgtttttatttttagtagagacagggtttcatcatgttgaccaggctggtctcaaactcctgacctgaagtgatttgcccgtcttggcctcccagagtgctgggattacaggcgtgaagcgccacacccatccaggttcacctcttgagtagagtgctgagatgctttctcacatgagattggtttctagtaataatagagggtttttttgctagttactttcttattgtatttatcttatagagtcttggttcttacaaaatcataatttgctttcaaaaatacatattttaaactacctaataagatctttatttagtgtcacatttacgaagggttgatgcttattttagtgatgatttgtcattaaaattatgtcaaaatgtcttaaaatgttgttgaaactgtaagcaaactcaacacgcacaaagctaattatgggtgccatctgtttatttttacaaagctttttttttaagactatggcattgtctgcttatgataagcttcaagattattataatgactaagtcctgtccttcaattagtgtagttgaagatgggaagataattcgtttgttcactgaccttttcctgtgtcagagtgtatgaaatatgacatgtcatgataaagaaactattgtgaagtgcatttagaagatacttaatttttatgagaaaaaaatgacatcaaagcagcagatgtggccaaagttttgtttaaattcttagaacttattcaaggttttagatgaacggtagacttttccagtgacttaagtggcttcattttaactcaaggttaagaatttctaagtgatcgaccaagtttatgttgacatgtatccctgtttgtgtacctatatgtcagcacatgtttttgtacatacatatctcatgtgttagtgcagaaggccaggtacatgcatgacagcatcagcccaagtagttatcagcaatctgctgagagagcagagcgatcgcactggctctgttttgcaattgtgcatgctaagcattacccaagtcagtgtggagggaaagcaacctgaaggatccatctgctcccttctgctacactgcctcgatgcaagattacactaatctggctgcttgtcaggacaggttagtgaaagcatgcaagtgggtgagacttagggtggactagtgctttggaaaatcataagctgcccctgtagatgccacgttaagtgcagcagaataggttgattatcggccacattgaagattgccgtgaaataaatatatagctttttggttaagaattagtttcaaaattaaaattcttaaatattgttggaccacagataaatcaaaattgagaaaaataatacagatagtttacaaatacttttaggccttagtttttcttatgatttgtgtattgtgtttattctttcattttattcccctagctcaagagttttttagtcaaatatgttcaaatgttacattcgattaacttcattttacccaaaaacttttgtgatttttcttgtttgtttctatttatttacccttttctacacctactgactggcagaccttggccttgcaggttgagcatcctgtcacagaatgcattactggcctggacctagtccaggaaatgatccgtgttgctaagggctaccctctcaggcacaaacaagctgatattcgcatcaacggctgggcagttgaatgtcgggtttatgctgaggtaaaatgaatggtgttgggaggaaggatggtggttatgtccagagtcatgagacctggtatagccaaacaatgaggtaaagttagggttttataatgttgccaactattggattacgtaatccataattaaatcagaaaaaaattagataattttgacctaattccagatagttttaaagaattgggcttagttaattgtcatgtatttgtagatggggaaatagctaccaatcctttaagaggcaacagagcattggttaaatactcttgagcttgaatggaccatggtttttgttttgtttgcattttctttgtttattttcaaacaacactaacaagaagtagcatttatttccatgggttttttaaaaaaatgcccaccttgggtacacattagttgttgatcagatatttacttaaaatttttcccaaccttttttttgtataattttctcctttattattacataaaaataacaatcaaaatttaaattgtaaagcttttagtaaaacatgtactcttaatttataattttaattttgggttttactcataaactctcagttcagtacttctaaatgctttttttcaaatgactaaaacaagaatgcaaggtaacatttgtactatttttacttttcgacatcaaaaatgtctgtcaagattaaaaataaatcagtgtctgtgtttaagaatactgagagctggtttgaaatatttttcaaggagttcaaaaatatgttttggcgtgactgtattgctcttgcttttttcatattttaagtagtattactttcattcttatgacactgaacctgtttattctgatgatctaagatatttacaaatgaagtgcatatctagtagcgtgcaaagttttttttttcaggtctttatttgaagaacccaaattctcaagttttaccatatgtgaactgttttgagaagtaagaaaaacaaatatctttagtataccacatttgttgttctaaacttgagtatgttttgatgtagggcctaggttattttattttttgcccaaggcattctaagaagttttataaaatgttggaattttaccaatttcaataaagtatgaacaaggtcaggctaaattctgcttacagttctgtttgatttttaagtacattctaagttgtctagcgtaaaagacaataatattctgaaatctgtgatttggtaaataccatatgttgaaaatagacctataaatggttcttcattgtgtaaatatttaaccttacttgtgctgatttatatttcaaagactgtgcttcctttcctttgaactttcaggacccctacaagtcttttggtttaccatctattgggagattgtctcagtaccaagaaccgttacatctacctggtgtaagtcattaagctgtaataccagctgaagggttaaaatcgtgatttatgtcatacttttatgttaaagcatgtcaacaccaaagggtgtaaattgaaggacaagtgaaattcatgggaatcatggtttttgtgttgaaaacaaatttttttcagtattttgtggtgttcaagaaagtcaggattcactggacaggggaagcctggggacatctgatgatataaatgatagcttacagtgttcccaattctttcgaaaattataataaaaaaggctgtgaatcctaagaatgagaaatgatgttttgtgttacaatttaatcttttcaataaatcgagtccaaccctgctatatagtcacttgtcaagaaattcaagcacaaaatcagctccttaattgaaatttaaggagattgaattaaggcaaacaaagtgtgcctcagtctattaaacctcatggactttaaagagtaataatatttatatcagttaaataaaagtgaccactgtccattttattccatagctcttctgtatttaatagctattttgaaaatagtttttgttgcagaaaaagagcaaggacataccctttttcttaatcaaggtaataagtgcatatatatatatatatatgacattatgttagctagtagatgacaaggctgtaccatctgtgaatattcaaattattcattttgattactggcatgaagatggtgaaagattacaggaagaattctaaatctgaagatattattggatatatgatttatttcactttttaaattgtttttgcccatgtgctttctaaagggacttgaccctttctgtgcttggagactccatgctgtgttcaaagccagaaggcagaaaaaaaattgtgaagatttaacaggcattatgtgacgttaaatagcacatgagaaaacaagtatcatagggacatatctaaacacttttttaatcaaacaaaagaagtattaaataagaattcataatgattactctagttgttagaagttttcaccatgttgtaatagctaacaggatgtcaaacattttgccctcgcaagtttttgcaatttgcaattttcaaacgtgagacctgttgaaagtacaagtgataatggacaaactataccccctacagtcttcatcccaccaaatctttcttcaattaatgctgcagcaggagttttatgtaataacatttgcagttgtgagccatccatagaaagaaaaaacaattaaaatgccttaaatgttctgcttactgctgttatttgcttgtgtgaatgttgcatgtcagctaaatggaccaaggagtagataaagtgattgggtgcaggagagtgcacactaagctttgtctatcattattgctgggagcaatcaaattgatgtcagcaggacagtagatgcgttgacagctgtaattatgtatctccatggtgatcacttttggcctgtcatggaggcccatgagtcccctcccttggaagcatttaatcagattgggctgtcacttgtcaggtagacatggcgggctgggagttgtgcttagggggagaggtgaattgagaatgaagggtgggagatgtctgatagtttcacagagtccactgtggtactgaagacagaaattttaattatgctagaggtttctgagcagtggtttgagaatctcgtacagaggtgcttgggtgttttgttgtggttgttattgtttgtttttcttccttgtcttattaaaactagagcagtcagtttaccttagaaaacaatttttggctcttaccttttttggtcacaagaatgcatacttaagagttaacttatggtttgtacttttcacatgcttcattaagcctgagatttattaatatggcagaggtgaagatttccttttttatttttgatcatcatgttttgtaaatttgttattttcagaccacagttttgttctgctcagaaatttggttctgatttcatttgaattttttcttaaagtttttagtgcaaatttgtatagcctttcattgaaggaatggagacttgatctgacttcagattggttgttaagaaataaaaatatagctgattattacttggaaaaagcagcataaatagtaaattataaagcagagttttcatactgtggtacagtttttaattgggaatactgatttgcttatacaaagatacgtgtttatatatatcttgattttatcgtatgtattttaaagttaagatgacataacttctgtgatcataatattagtaaataacaaagacagttatatttaattaagatctgtaggtaacaccttataggatgatattattcaaggcaactgaagttttaagtaaggaactgtagaagaacataataaatattctttattgtctatgttattttatttgtgggttgaacatctaagttcttcctagctttgtagcagtttatgtagcaaatgataggatgtagttaaagtcagaagttttagaacttgtatcagtctcgtttgtaaacacagcattagcaagcatgctgtggttttaaagatgacatagtggtcaaattagctctttcactttttagtactaaaattaagaaaatgaaaactcacagatatattttctgttatgtaacccgtttactagttgccattttggggctctttaatgtggggaaaaggtagattgtgattttattgcttttaaagctgctccattaatttttttctagtttttgtcaacactgtgaatttcatagaacatcagtttatgtcctgaaatatgttttcagaaaatagaaagccaagtatatttcgtaagtgtgctgaatgatttttgtttataattaagatttttgtatatgaatgtgaatacgaatacagatatctatatttttgtttgtgcttgcaaatacagaaataaaagcccttcaggtatgttatagtgttccttttacaaccttacaaagagaataatagtagtgtgaattttaagaaaatgaaactatcgcttgtcttctgatgtcaccgtataataaagccatcattataccctcatgtggatatcctagacaagaggttctacatgtggtcccttgataattgcctaaattaaaatattaaaggcctaacagccgctgtgttgacctttttctgccttgctgcagacagatgagctgctgtttattaggaaggcttcttcccacaggtggaaggctacgtgagcttccgctcttctcttcccacccctttacaatgttgggcatcaaagtcctgctgttccagcagctttgattcagttcctccatcctcaagacccctaggatgtgcctgacagtctgaagtattttgattagcttttaaatacttcagattccaaaacttctttctaataatttaataaatgttctgtcctcagtaactgctcatttttaaagttttgcatggctaacctccgtgccttgctgctggtatcaaactgggaaatgaaaacaagaatcagtgatgtactaactcactcgttggctggttaacagcaatcagcctcttcaaaagaatattttgaacttgtgctatccccctaccccccaccccaagaaaatcacaaaatcagaactctaattggggctttacaaagcaaagccataggaaaagctgtgtaaacatgaaagcctcaggggagcaacagtaacagaaaaatagtgttttacagttgagagggtgaggcagaaaaggaaagtgttacagacatgaaaggcccaggcccacattcctatggagctgaggaccaggcttgacgaggggcctcactggtgggctcagaagggtctggcagggagtgcagttagcaagggcatcgtccatgccatgcttcagctggaagacaccatcagagagccacagcatcctggcatagtgatgtaggaagtcttcattttttattttttatttttgctgttttttagtttcgtcattcagtggcagaacaaaaaatgtgttgcattacatattaacggatcaagattttagattgttttcctattttccagaagttgaaatgttatttgagattgaaattctctatccattttctccatggaaatgaaattggtggttacaaaaaaatatctacacaatatgaattacttttctttttttctttttttctcccaggtccgagtggacagtggcatccaaccaggaagtgatattagcatttattatgatcctatgatttcaaaagttagtttaatttctcaatggattatttgatttcttcgaaaaatcaatgatatttaaagagtctgaaactgggcctttatctgaatcataagctataattaaacaactaattatgcactgatgtaaatgtgaaagcagagcaggttttttctcttgagagaaaattcagcgttatgttagtttgtagtactcctcctccccaactaaatcatgccacaccatcacacacatgcatgaacaataataataataaacatctaaccagtggtgccagcctaactcattgccatgagaaggaattaaggttttttttggccattggcagaaattacctgagatggaagtatgaatgaatggcaagagttgggctgataggcagtgtttgttagagtactttttgatcttttctcttcagtttttacaaattaccaattatttaagtagatgtgatgtaagagtataagatttgttttgcccacctgtctttttgaagtttgactttccagaataaatgaattgaatttttggatctttaaacccttaaaaccgtataaagtgtaaaatgctgtaataattaagattgtggattttatttttattttattattatttttttgagatggagtctcgctctgtccgccagcctggagtgcagtggcacgatcttggctcactgcaacctccgcctcccaggttcaagcgattctcctgcctcagcctcctgagtagctgggtggctcgtgccaccaagcccagctaattttttttgtttttagtagagatggggtttcaccttgttagccaggatggtctccatctcctgacctcgtgatccgcccgcctcggcctcccaaagttctgggattacaggcgtgagccacaatggccggccagattgtggattttattttgaaaattctgtgttctctgaaatgatacatctgtattgaggaatgatttgtttttcaagccttgtttctcaagatggcttttccccaagtgtcctttttaatgttatagttgcagtaaacaaacacttttttatctgtctttcttcagttagggttttagtgcttttttttgggatagggtctccctttttcacccaggctggagtgcagtatcatgatcttggctcagtgcagccttgacctcccaggctcaagcgatccacctgccttagccacccaagtagctgggactacaggtgtgtactaccatgcagggctatttttttatatcttttgtagaaatggggcttcctcatgttacccaggctgatctcgaatacctgagctcaagcaatccacccgcctcggcctctcaaagtgctgggattacaaacgtgagccaccgtggttggcctaagttattagtagtattaaaataaaatttaggtcttttgtttattagagaaccaccatttaatttaaaaataaaactatgtaaaaatattatacgttgatttttaaatattccatttttagatgaatgtttttctcttcagaaaaatggcctacaaattaattttcaaatttgcttgatattgaagagctagtaaaacctactaaaataatcacaatctatagattggctaatataactgccagaaaaatctttaatgaatagttaaggtcttatttcattgccaaattatagagatacatataagtaggcactaaatcatgtagaatagtaagacttttctgtttttttgatttctgaaaaagtaccatttgcttctgtgtatattatatgtaaaactgcaaatgatttctaagatagtcgtcttctttctttatacttttatttttgaaactttactttttttgttagttatgaaagtgttaagggctggacgcagtggctcatatctgtaatcccagcactttgggaggctgaggtaggtggatcacctaaggtcaggagtgtgagaccagccaggccaacatggcaaaaccctgtctctactaaaaatacaaaaaaattagctgggcgtggtgacacacgcctgaaatcccagcttctcgagaggctgaggcgagaggatcgcttgaacctgtgaggcggaggttgcagtgagctgagattgcgccactgccctccagcctgggcaatagagcgagactccatctcaaaaataaaaaataaaaagaaaggaaagtgttagctattcagggtatcaaacttggaaaccacagaaaaatagggaaaaaatgtcttatctaatcctcaccactacccttggtgttcaaatcctatctcatatattcacgtttagctgtatctccttttaaattttttctgtacttacttttgttacgtttttgtttttgtaaaatcactctttactatgataatgaaatgtaggagaagagtctgaaatagcttgattctaatatttatatacttaaaaaatcataattgacatgtattgaaaactgaactatcataaaatttcgagatatatttagaaatctgttatgaaatattttaatttttactaaaatgaatcatttaacatagttctaaatatatatatatattgggttttttgtttgcttgtttttagctaatcacatatggctctgatagaactgaggcactgaagagaatggcagatgcactggataactatgttattcgaggtaaaaacaaagatttgcactcgttggttattgtatatggtgtccagttccagagaacagcctgggggtttaccaatgagaatatggcacagcacatttgctcactatgtgcttaaagagaaataagaaaaactcaaatccatcaaaccaccataccaagtatagccgtttccactgttttaagcaaatgcatattttctctatatgcctaacatatatattactctatataaccagtacacattggttacacaggccttcaggagggcgtcttttttcttacagaagtaatattgctgtggagaggtctttagtgcgtatttgggacacacgttcagtttatgtgagtttatctatgtttatctatatatgcgagtttagatagacataaataagttacttgggaagattattcctggaagacattaaagtatttgtaagcacattctatggggattttctccctttttatctctgcatttttattgtggtaattgaaatactagattttggttaatttaatttttactctaatgtgcttgagcagtaaatccatgaatttgagagtctgaataagaatattttgtcaaaactcatttctgttaaactgtgatataatacgacataggggcatggcatctgggcagtttgtcaaaatattagattagttttggtcccaactagaagttatttatctactccatctggcttctgaaaggagtactcttttgtatttacatgaataccatttcatgttttatacttaaatgaacattttcccactaatttgcttactctatatatgtatatataggttcaccagttactacagtttttaagtgactaaaatacaaagtaggcttgccattattctcctaactttatatgtgtcacatataaaaaataaattttgttgtataggtagatttttccaggcttagtctgaaattttgcctttgaattactgtgatgtagtagacagaaaccagacaaagctaggttcatagcccctgtcctgacgccatttaataattatgtgatttttggccaagcacggtggctcacacccgtaatcctagcactttgggaggctgaggcgggtggattgtgaggtcaggagttcaagaccagctgggcaaagatggtgaaacccagtctctactaaaaatacaaaaattagtcaggcgtggtggtgggcgtctgtaatccccgctacttgggaggctgaggcagaaaattgcttgaacccgggaggcttagtttgcagtgagccgagatcacgccactgcatgccagcctaggtgacagagtgagagtccgtctcaatgaaaaaaaaaatttttttttaaataaataattacgtgatttttgtcaaatgactttgtctctctgaatctcatactccacatttgaaaaatggagtgatagtctctgccttataaattactggtgaggattaactgaggttaagtatataaagggcttggcaccacactggcttatgttgttcaataactttagttgtcatcctttcttcctctttcctcacacttaataaaaccatatatttaagaatcaaggccaggcgtggtggctcacgcctgtaatcccagcactttgggaggctgaggagggcagatcacttgaggtcaggagctcaagaccagcctggccaacttggcagaaccccgtctctagtaaaaatacaaaaattagccaggcgtggtggtgggtgcccatagtcccagctactcaggaggctgaggcaggagaatcgcttgaacccaggaggtggaggttgcagtgagatgagatcgcgccatcacactccagcctgggtgacagtgtaagactctgtctccaaaaaaataaaaataaaagccatgtgttataaatcacattatcaatccattagtcatatgaaatttactaaatcatagataaacaatattgaaagaccgttttatgtaatttctaatactgtgtgcggaggttatatgctttcattgcaccctgttcaaatacttctccagagaatttaccgtcactgtaaaattaaagtattaattgtgtaattaactgtgaaatgttgggttatcctataagattattaggcacatgaggacactgatgatctttatcttgtttgtatgcatattgctggtgcttagcagtgtctgacacatgctagatgattaataaatgtttgttggatgaatgaatgagtgagcaagtgatactatccctgatttcaaggagttactaatatacttggtgtgaaaacatatgaaaagataagtataatattaatatagctttgtaggtgccccaataggggattgaaaaagggtagtgggagtttaaggaagaggctagcatatctttcttttctcgcctctcttggtcctttgaaagtaactagtactgctttaggactcatagtgtctctgtgtctctgtcgagagtacctcactttgttctgctttcaaatgatcctcagagtggcaggatttttaaaaagactggtaatgtcctgtgtaggtgaaataaaggggatgggcacgctcaagcgtctttgcagtatcacttgttatagtattttgggaaaataatctggtgttagatgttaaaataaaagtgcataccctctgacccagctattcatcttttgtgaatctttcctatagagttaaaaaactgaattatgagcatgttcaccatgacatttacaacaacattgtttgtagtagccaaaatgctgaccaaccacagtgtccgctaaatggatgaatgactgaataaattacaatgcattattactataaaatactatgcagctgtgacttaaagacctgtttgtatgaatcgttaaagtagaaaagcaatttgtagtcatgtgtagtacattctcatatcacttgaaccatcttctcatcctaaaatattttaaattgtgttggatgagcacagagaaaggtgtggacatctacatatcacaataatttttttaagctcaaaggatttatgagagaggggtttttcttgacacatttctcttagactttttaattttaggtattttcaaatctatagaaaagatgaatgaatagtactgtgcatgcctgtgtactcttcacctagattattatttaataaacttttttttgatatttgctttctctatttctccctttctttgccttttcctcttcctttctcacccttcctctttcctttcctccctccattctcttctctgtttttctcctgatccatttgaaagaaggttgcaaacatcatggcgcatcactcctgaatactttaccaggcttcttaaggggaagaccatgttcctgtaactggatttttcttgcctgctgcacagatagagtctatttattgagacagcgttattgcaatagagaaagagtttaataaacacagggctggctaaatgggagactgaagttttattactcaaataaatttctcccaaaatttggaggctagggtttttaaagaataatttggtgggcagggggccagggagtgaggaatgctgactggttggtttggggatgaaattataggtgcttgaggcagggtcttcttgctaccttcagttactgggtaagatcacagaactagttgagccagtttgctggtctggctgcatgactcctgagccttaatttctaatgttagttttacaaatgcagtctgttccccagacaaggagggggtttgttttgggaaggggctgttttcattgttttacagttaaagtataaattaaattcctcttatagttagcatggcctacacccaggaatgaacaggggcagcttggaggttaaaagcaagataaagttggttaggtcggatttttctcagtgtcataatttttgcagtggccatttcattcctgcaaaaaagcacaataccatcattacacccaaggaaaattgacagcaacctaacagtttcatctcatgtattgtccatatttaagcttgtccctcggagtctttttttattgttttttaatcccatctgtggcccaaagttacacagtgtctttgattatgtctctttattatcttgccgtctttcatatttcatttcattaattttcaggagagtccacggtagttgatttgtagaatgtggcacattctagatagaaagtgttaacgttggttcactaaaggcacttgtgaagtgattccaagaatgagggttgtaggtgataatttgcactatcactcacagaactcgcagaaactctttgcttactattatcagtttattataaagggtacagcttgagagtaacccagtggaggagatgcacagggcaaggtgttaggaaggggtgcagagcatccatgccctctccaggtgcaccaccctccatcacttccgtgtgttcagcaacccacaagtcctctgatccttgtccttgggtttttatgaaggcctgactaggtaggcatgattgatcctatcaatctgccattagtgattaagtcattcttcagtccctctcccctttggagggtgggggtggggctgaaagttccaaccccttaatcacatggttggatcctctggccacctgctcccatcctctaagagtcatctcattagcataaactcaggtatgattgaaaggagcttgttatgaataacagaagacattcctctctcaacagtcatttctatgatattcttgccaaaaatgtacaacctgagtataatcatgaggaaacatcagacaaaccaaattgaaagacagtctacaaaataaatggcttcttctcttcaaacatgtcaaggtcaggaaacacaaagaagagttgagcaacttatgtagatcaaaggaaactaaagacacatgacaactaaatgcaatgtgtgatcctggtttagatcctggaccagaagaaaaatgtttttcttttgtagtaagggtcataagtgggacaattggtgagatttgaataaggtctggagatgaggtgatagcaatgttagcagtgttaggcttgtctgattttgatccttgtactgtgattatagaagagatataccttgcttttaggagatgtacactgacatatttagaagtaaaatgacatcttgtctgcaacttaccttcatatgtttaagaaggaaaattatgtatctgtgtataaatagaaaaaattagtgacaaagcaaataaatgtgataagatgttatcatttgtagaacctccatatatagtaattctgcttactatttttttgaaatttttttaaattttgaattttgaaattatttcaaaataattttgaatttttttattttgaaataatttcaaaatttaaaaaatttaaaatttaatttcaaaataaaaagttaaaaaaatagggaagagcaagaacccccactctccactaatatttaaagaataaaagcagagatgcatttgggattttgaacttacatattactcatctggctaattctgaaggataggcaggtttaaaaacttgctttatgaaaggcagaaaagggaagacaatctactgtcttgtttggtaactgcttaattattcaaatatgaatatttttttcctgtgctgattgtgaacttttgttaagatagagaaactttgaagcaaaaatgtaattcggttaaaatgaatttcaaaatcctcatgaaataagagtgcttttggcctctgtttgatcctggcagcatgtctagctgatgtctgggcagtgttttggaaccagcaggcagtcaggggaaggccactcctaggggcctcttctctgtggcctggtggtgatttcccatacagatgggacctggtgaactctgccagaggtcatccttgactcccagtccacacctcccagtcataatttttatgagtatgtgattaataatatccttgaagttgtaaactaactctcaaagaatacctctactgtccccataccatttaaacaaggatctgttcaaatagtgttgtctttcctgggatgtgaaaagaaagaaactaaatgcaaaatggtaactttcaaatctgtatgatactgtttagtgcttcagtgattcttcccatctagctgatcttttgagctcttaggtataaaatacttttctgattattaccctcttttggctttaggattaattaatggacagtagtttcgggaacagttagtcgaggcatagatgtttgttgtctgccatgagccattatctcaccatattggccttaggaaagaaaaagagataacgatttagttttgcatagtcatatataatattttatttagaaaacattaaagagaaaatggttttgtgttttaattttgtttttaaaatatcatttagtgagataaaagtctgtgtttttatgctgtatttactattcaagtagaaagatttttaaaattccatgcttcatttacgtgcttgatggctctgttctttgatatccaaaatgtaaattaatatttgctttcaattcctttgagttagatttttctaaaattaacacctatttttcagctttggatatagaggacaaatacaacatatgatttatcctgtgaaactgcaagcatgttaactttctgaatattatcagtcacaaattttgggcatcagaaaataatctctttttttgttcaaattgtcattaactatttctgaaaactatattgtattttactgatgacagagtttggttccacctattttaacattggccacacagggagctaaaaaatttataccagcagtaggctataaacatgaaagccagtaaagttaaatatgaaatattaaatatatatgttaatagtattctttttttttttggagatggagtctcactctgtcacccaggctggagtgtagtggcatgatctcggctcattgcagcctctgcctcccaggttcaagcaattctcctgcctcagcctcctgagtagctgggactacaggggtgcgccaccacacctagctaatttttgtatttttagtagagacggggtttcaccatgttggtcaggctggtctcaactcctgacctcaggtgacccgcctgcctcggcctcccaaaatgaacaatactatttctgtttaaccagggcagggaagttcaaaaatcctgagactgcctgctaacttacttactgttttgcaaaaacacttgtaaattgaaatattctgaattatttatttgtacataagatcaatatttttggtaaaataaattgttgatgtaccttggtctaatacctttcatcccttccagtccctcccttagagtcttattttttccagaactttatttatttattgtaatatatgagcgatttgcatattgctggttttatttcacgtttctctgtctcaccctgttttggattccttcacatatgggagatgttcccccataagtaggaacgtctgttttctgatgtataccatcgaatctgcctgcttttctgaaccttaatcattcagacatcatctcacaggcatctcaaatttaacttgtccatgaatctgctattttcctctcaacctgtttcttctctgcaaatggcaacttctctcatgttgcagagccagaactttgggtgttgtgctcatctccccattctttgtaattgtggttgttgttttgagacagggtctcactctgtcacttaggctggagtgcagtgatgggcccagggctcattgcagtcttaacctccagggttcagctgatcctcccacctcaacctccctggtagctgggactacaggcacaagccagcacacccagctaattttttgtatttattgtagagatgggattttgccatgttgcctagactggtcttgaactcctgacctcaagtgacccacccacctcggtttcccaaaatgttgcaataacaggcatgagccactgcacctggccctcatctccccattcttgccatcagtccctgcctgcctcctgaatatccgtcaagtccagctgcttctcccatctgtattgtcagtgtcctagctgtggaccccagccttgccatttttcagcatatctccgcaattgtcccctaaggaatttttccatcttccctcttgcccttcctcagtcccttttccgtatagcagcctaagtgattctggattgcataaatctagtcatacctgccctgcttcccattctagttgctctcatgggaatgtggaatctgtgcatggcctatcacacgctgaatgcctattggccttttcactgcacccagcaccgttctctcctttgctcatactcagaccatggtgttttcctttcattcctctccataggaatacctggtggtaatcatttgctttttgcaacagtgaaatctctctctgtctctgtctctctctctcttttaattatactttaagttctaacaacgtgcaggtttgttacgtaggtattcatgtgccatgttggtgtgctgcacccattaactcgtcatttacattaggtatatctcctaatgctatccctcccccctccccccaccccatgacaggccctggtgtgtgatgttccccttcctgtgtccaagtgttctcattgttcagttcccacctatgagtgagaacatgcggtgtttggttttttgtccttgggatagtttactgagaatgatggtttccagcttcatccatgtccctacaaaggacatgaactcatcattttttacggctgcatagtattccatggtgtatatgtgccacattttcttaatccagtctatcattgatggacatttgggttggttccaagtctttgctattgtgaatagtgctgcaataaacataacgtgtgcatgtgtctttatagcagcatgatttataatcctttgggtatatatacccagtaatgagatggctgagtcaaatggtatttctagttctagatccttgaagaattgccacactgacttccacaatggttgaactagtttacagtcccaccaacagtgtaaaagtgttcctatttctccacatcctctccagcacctgttgtttcctgactttttaatgattgccattctaactggtgtgagatggtatctcattgtggttttggtttgcatttctctgatggccagtgatgatgagcattttttcatttgtctgttggctgcataaatgtcttcttttgagaagtgtctgttcatgtccttcgcccactttttgatggggttgtttgtttttttcttgtaaatttgtttgagttctttgtagattctggatattagccctttgtcaggtgagtagattgcaaaaattttctcccattctgtaggttgcctgttcactctgatggtagtttcttttgctgtgcagaagctctttagtttaattagatcccatttgtcaattttggcttttgttgccattgcttttggtgttttagacatgaagtccttgcccatgtctatgtcctgaatggtattgcctaggttttcttctagggtttttatggttttaggcctaacatataagtctttaatccatcttgaatgaatttttgtataaggtgtaaggaagggatccagtttcagctttctgcatatggctagccagttttcccagcaccatttattaaatagggaatcctttccccatttcttgtttttgtcaggtttgtcaaagatcagatagttgtagatgtgtggtgttatttctgagggctctgttctgttccattggtccatatgtctgttttggtaccagtaccatgctgctttggttactgtagccttgtagtatagtttgaagtcaggtagcatgatgcctccaggtttgttcttttggcttaggattgtcttggcaatgtgggctcttttttggttccatatgaactttaaagatccaattctgtgaagaaagtcattggtagcttgatggggatggcattgaatctataaattaccttgggcagtatggccattttcacgatattagttcttcctatccatgagcatggaatgttcttccatttgtttgtgtcttttattttgttgagcagtgttttgtagttctgtttgaagagatccttcacatcccttgtaagttggattcctaggtattttattctctttgaagcaattgtgaatgggagttgactcatgatttggctctctgtttgtctgttattggtgtataagaatgcttgtgatttttgcacattgattttgtatcctgagactgctgaaattgcttatcagcttaaggagattttgggctgagatgatagggttttctagatatacaatcatgtcatctgcaaacagggacaatttgacttcctcttttcctaattgaataccctttatttctttctcctgcctgattgccctggccagaacttccaacactatgttgaataggagtggtgagagaggccatccctgtcttgtgccagttttcaaagggaatgcttccagtttttgcccattcagtatgatattggctgtgggtttgtcataaatagctcttattattttgagatacgtcccatcaataccaaatttattgagagtttttagcctgaagggctgttgaattttgtcaaaggccttttctgcatctattgagataatcatgtggtttttgtctttggttctgtttatatgctggattacatttattgatttgcatatgttgaaccagccttgcatcccagggatgaagcccacttgatcatggtggataagctttttgatgtgctgctggatttggtttgccagtattttattgaggatttttgcatcgatgttcatgaggaatattttagggcctctctgtattgcctaggctggagtgcagtggcacaattatagctcactgcagccttgaattcctggattcaagtgatctccctgcctctgactcctgagtagctgggactacagatgtgccaccctacgcggctaatttttaaattttttgtagagatagggtctttgttgtccaggctggtcacaaactcctggcctcaagcagtcctcctccctcagcctcccaaagggctgggattacaggtgtgagctaaattcctccctaatgttaccatagccttagctacttatctttgggtccttctcatctttctgttttccttcccagccaggaaaatctgtgtaagtctcaaatactttcctcttcccggaacaccaaagctgtcatttcctatgcaggtgaacctttctggcaagtgatacctcttttctttttcaaaagcactctagtttgtctctttgtgaaacatgatcaagggattaatttcccatgttttatttagcctgatctctttcaaggagctttttacatttttgcctacctaattgatctttctaagcatcctagcatattgccttcagttgcttttcactttcatctaaacaaaagcaacgccacattttttcaatgatttcttaggtatattgatgtcattagaaatttcatctgccttctactatgtttctcattaaaaaaacttattaaagccctctgaaacatagttattatgtatgggccaagtaaatcattacccacagaacaagcatgaaatagctgtgtagatctcatgggcatgcgctatagaagatctgtgtgtgtgtgtgtgtgtgtgtgtgtgtgtgtgtgtgtgtgtgtacataaagcaatctataatatatatatatgtatatagtgaagaatatgatcgattctgatatatataactttttccatggaatttttgtgtagctaaaggaatagcattaatttgaatttgtgaatgttttctaaacgtcttgaggcagttttgataaattgagaattggcctttataaaatttagatacatagcatctcttgagtcaggaacagaaatgctcaggattttccatatggttgtggatatggtctagtataaaaggatgcataggaaaatgcctgggagggtatacatgttaagctgttatcattggctagcttagagatggaaagtcatattgaaaaggtgtgccctgctcgctcaaacacatgcactagggtacagggtaacctgctgtaacaaagatttctaaatacagtgggataaataagagagacgtttatttacctctcatgtaactgtctggtccatgctgctaggaggcaagtcagcctcatgaggtcattcaaagatacacacacccatcctgatgtgccactccgtttgaattgccaaagctgagtttctgccatgtcaggaaacccacagtaagacgagaagaaaggaagctcaagcaagcaatgagagagtcggaagttgcgtacatcactttagcttaccttcctttgtctaggaattagtttgtcatgcctacctacaagctagatgggaaagtggagtctgtgtctgggtgtcttttgctcagctaaaattctattactatggaaaaatgaaaagcaggttttaggagaaactagcagtctgtcacaataaactgtgtcttaaaaattgtttatatataattatatatatgtaactattgtgatatataatgtgctaatcattaggtaaactattcagtctctctggattgcaattttcttttttttaattttttttttttcttttagagatagggtctctctctgtcacccagatttgggtacagtgatgcagccgtagctcactacaacttcgaactcctgggctcaagtgatcttcctgcctcagcctcccaagtacctgggactataggcacatgccaccattcccagctaattttctgtttttattttttgtagagacagggtcttgctacattgcccaggctgatcttgaactcctggtctcaagtcatctcccaccttgacttcccaaagtgctggaattaaaggtgtgagccactgcacccagcacaattttctcatttgtaaggtcccatttttctctgtagtttacttattctataactagttgcgcagtttcccaagagcaggtaccatattgtgtgctctcattttccttcccatgatatctaatggctgcatgagtaatagtgtagaatacatgttgatgcatatagataggtttgctcagattaaagggctagatagtaaatgttttagactttgtgggacacaaggtttctgttacaactgcttgactctgctgttacaacatgaaaacagtcatatgtaagcaaaccaggctggctgtgttctaataaaactttttttacaaaaataggtaggaggctagatttggccttcaggccatattttgccaaccattgtcttgtaggaaagttacactttccaaatagatacaggtgtaaactcagatttcaggagctccattctttttttttttgttgtttttttgagacagagtctcactctgtcacccaggctggagtacaatggtgcggtctcggctcactacaaccttcacctcccggcttcaagcgggaggcctcagcctcaagagtagctgggattacaggcgcctgccaccacgcctggctaattattgtatttttagtagagacggggtttcaccatgttggccaggctggtctcgaattgctgaccttgtgatcctcctgcctcggcctcccaaagtgctgggattacaggtgtgagccactgtgcctggccaggagctccattcttaacagaaaacagaactagaagttaggtaggtcagtgctgaagcttaggatgcaggaaaacttctgtctgatgttttattaattacattttgtctcatgctctttgtatattcccatataacaggatagtaatgttcttttttgagagcccagcattgcattaagcattatatcatttatacctgataacaatcatgcataataggttctattattgttaatttacaaatgaggaaactaaagctttgagaggttaactaacttacctaaggtaagggatagacctggtatttgaacttgactatctgattctttgcttactttatggttattgttgcaaaagtggggattctgtgagacttgaatagtaaaatcagaatcatacttcgtaggtttcttatgcagcatgatggtacagattagaaccatacaagagtggactaaagtaataggaaggaatgaacaaacctctgtttactttgacttcagctgtcatgctgcagtcacctgctcttcttgtggaagcctgatgtaatttctgccttccctggatgtaacatgcttcctcccacttgctttcattcctgtgtaacatctttgtaatctggatgaccaagattagatacttcattcttcacaaaaccttcctgcatcctagaactctcccaatactattagtatcctcttgtggcagttacctattttgatattacagttgacctttgaacaacactggtttgaactgtgcaggtccatttatcttggattttttttcaataaatatatcctaaaattatttgaagatttgtgacaatttgaaaaagctttcagacaaactctatagcctcgaagtaccaaagaaagaaaaaggtatgtcatgaatacataaaatatatagagatactagtctgtttcatcatttgctattataaaatttacacaaatctattataaaagttaacatttatcaaaacttacacaaacagagaccatacctggtgccattcaaagcagagagaaatgtacacaaacagtaaagacgcagcatgaaatcataaccacattaagattcactgtagtacatactgtactactgtatagtttcatagccacctactgttgctattgcagtgagttcaagtgttgcgagtatctgcttaaaacaccatgtgatgctgatcaccgctgtgtgatcagttctctctccagtaaattgcatatggcagtaaaaagtcattgcttatggttctggaatatttttcatcatgtttagtgcaaaccataaactttgaataacaggacagaatccatacaaagtgctactagtaatgctggaggtcctcccaagaagcagagaaaagtcatgacattacgagaaaaagttgaattacttgataatatatggtagattgaggtctgcagatgtagtttcctgtcatttcaagataaatgaatcccatgtaaggaccattgtaaaaaaaaataaaatgaaatttatgaagcatttgctgcagctacaccagcaggtgtgaaaatcttgcacttttttgtgaaacacctttcatttcatattgaagatgcagcttttatgtgggtacaggattactataagaaaggcattcccatagactcgaatatgactgtctatgggaaaagtgaagttgttatatgacaacttaaagcaaaaggaaggtggaaggatataaagctggagaatgtattgccaaccaaggatggtttgataattttagaaagagatttggctttaaaatgtgaagacaaaatgtgaaggggaagctgtttctgccaactaagaggcagcattaagacaccattaagaaaatcattgaagagaaaggatatctgctgaacaggtttttaatgcagacgcaagtgccttattctgagggggaaaaaaaagccacaaggaacatttcttagtagggaaaagaagcaagcatgaggagttaagacagggaggaataggctaactctgtctgttgttctgtgcaaatgcaatcaggtttatgatctgcacttatctgtgaagctgctcatctcctagccttgaaggaaaatgataagcaccggctgccagtcttctggttgtacaacaagaaggcttggacaatgagaaccctttttctggattgactccattgatgctttgtccctaaagtctggaagtactttgccagtaaggggctgtcttctaaagttcttttgatatggacagagccccagccacccagaacacatgtgtttaacatcgaaggtgtcgaagtggcctgcttctccccaaacccaacaagtctaattcagtctctagctcagagtactgtaaggtcctttcaggctcattatacacagagctgtatggaaacgatcgttgacactgtggaagagaaaaagtctggaaagattacaccactgaagatgcattgttgtcatataaaaagctgtgaaagccatcaagcccaaaatttgtgctggagaaaactttgtctggatgttgtgcatgacttcacaggatttatgaaagaggcaaccaaggaaatcatgaaagagattgtggatttgacataaaaggtggagtgggggttgaagggttttaaggtacggatcttagaggaatccaagagcggatagacaccacacccgaggaattaacagaggatgacttgatgtagataaatgcttctgaattggtgccagaggatgaagaagaagacatagaagaagcagtgccagaaaacaggatcacatcagacaatgcggcagaaggattctgattattcaagactgctattgacttattttacgacatggacccttctgtgatactggcagtaaaactaaaacagtggaagaaggattgaaatcatatagaaacatttttagagaaatgaaaaagcaaaaaaggcagacaaaaattacaaagtatattcataaagttatacagagtgtgccgcctctcctgcctccccttccacctcctccacctctcctgcctctgcaacccctgagacagcaagaccagcccctcctcttcctccttctcctcagtctactcaacctgaagaggaggaggaagactgttatgatgatccacttccacttgatgaatagtaaatgtattttctcttatgatttgcttcataacattttctttagctttattgcaagactgcagtatttaatatatataatatataaaacttgtaattgactatgttttcagcaagggtttcagtcaacagtatgttattagtatttacttttttgtagcatcaaaagttatatatggatttctgtctgtgcaggaggcacccctaatcctcatgttattcagtcatcacctgtgctttgaaattgtcattgtgtactaggctcaatttttttctactagattacatgcatctttaaaaaaatgacttattgaggtatacttgacataataaatttctgatatttaaagtattcaatttcatgagttttgacatacgtatacacctgtgaaaccattaccacagccatggtgttgaacacttctttcacctctggaagtttccttatggtctttgacatttaccctccctctacccctttcccagtgtaaccacatgatctgctttctgtcactgtaggctcgtttgcatgtcctaaaattttatattaatggaattatacattattatgcattatttttggtcttgcttttttaactcagcataattatttttaggtttatccttgttatttaatgtgttattgactctgtgtgtgtatgtggaatagaattccattgtatggacaagcccagttttgttaattcatttgcctcttaatggagatttaaattgtttccaggttttgattatagtaaataaagctgctattaacctttgtatgtaagtctttgtatagacatatgtttttatttaacttgacttaatacgtaggagtgagttgtctgaatcagtgaatatatgtttaacttttccagaaactgccaaactgttccaaagtgtgtgtatcattttatattgccaccacagtgtgacaattcttgttccatatcctgactagcacttgctattatctgtcttttcactttggccatgtaaatcggtatattgacggcatctcattgtgtttctttaacaataatgatgttgaacaatttttcctatgcttagtggacattttgactgtgtttttttacttggtgtgttttttgtcttataattgtgttgtaagtgttctttatatgttggtagatacaactcccttgttcaatatatgtattgtgggccagacacggtggcttatgcctataatcctagtactttgggaggccaaggtgggtggatcacttgagcccaggagttcgagaccagcctgggcaacagcaaaaacgtgtctctacaaaaaatataaaaattagctgggtggccgggtgcagtggctcacgcctgtaatcctagcacttcgggaggccgaggcgggcagatcacgaggtcaggagatcgagaccaacctggccaacatgatgaaaccccgtctctagtaaaaatacaaaaattagctgggtgtggtggcgtgttcctgtaatcccagctacttaggagactgaggcaggagaatcgcttgaacctaggagacagaggttgcagtgagccgaggttgcaccactgcactctgacctgggcgatagagtgagaccctgtctcaaaaaatatataataataataataataataataataataataatgatgataataataatatattttatgtgaatatcttctctcaggctgtagtttgttattttattttcttagttgcctcttttgaggagcagacttaaattttgatgaagtacagtttgtcaatatttttatagttcatggtttctatgtactaagaatccgttgcctaccttaaggtaacagattttttcctccatattttctactgtagttatgaaaataggtttgtgattcatttggagttaattttttgtctatgttgttaggtgttagcgttgaggttaattttttttttttttttttttttgagatgttgtctagctccgtcgctgaggtgggagtgcagtggtgtgatcttggctcactgcaacctccacctcccaggttcaagcgattctcctgcctcagcctcccaagtagcggggattacaggtgcctgccaccacgcccagctaatttttgtatttttagtagagatggggtttcactgtgttggccaggctggtctcgaactccttacctcatgatctgcctgcctcggcctcccaaagtgctggaattacaagtgtgagccaccgcgcctggacttttttttttttttttttggtccaaatggttagctgtttgttctagtaccatttattgaaacgacatttattaggttggtgtaaacataattgcggtttttgcattgctgaaatttgctgtttgatattggaatacattcttaaataaatatggttatgttatacatcattttaatgtacatttctcgctttgtttttttgctaatgacttactactggctgtttaatttatatttagagtatggaaatgatgttagacaaaaagcaaatctgagcaattttcttatttgagtttaaaatgggatgtaaagcagcagagacaacttgcaacatcagcagcgcgtttggcccaggaactgctaatgaacgtaccgtgcagtgatggttcaagaagttttgcaaaggagatgagaaccttgaggatgaggagcttagtggccggccttcagaagttgataacaaccaattgagagcagtcatcgaagctgatccttttaaagctacatgagaagttgctgaagaactcagcgtcaaccattctacagtcgtttggcatttgaagcaaattggaaggatgaaaaagctccatgagtgggtgcctcatgagctgactgaaaataaaaaatattatcattttgaagtgttgtcttttcctgttctacaagacaatgaaccatttcttggattgtgatgtgtgatgaaaagtggattttatatgacaaccagcgatgatcagctcaatggctggaccaagaagaagctccaaagcacttcccaaagccaaacttgcaccaaaaaaaggtcatggtcactgtttagtggtctgttgctggtctgatccactacaggtttctgaatcctggtgaaaccattacatctgagaagtatgctcagcaaatcgatgggatacaccaaaaactgcaatgcttgcagctggcgttggtcaacgagaaatgtccaatttttctccataacaacacccaactgcacgtcacataaccaatgcttaaaatttgaatgagttgggctatgaagttttgcctcatccggcatattcacctgacctctcgccaaccaaccaccacttcaagcatctcaacaactttttgcggggaaaacacttccacaaccagcaggatgcaaaaaatgctctccaagagttcgtcaaatcccgaagcatggatttttatgctacaggaataaacaaacttatttctcattgagaaaaaggagctgatgtaatggtccctattttgattaataaagatgtgtttgagcctagttttaatgatttaaaattcacggcccaaaaccacaattacttttgcaccaccctaatacagcccgttgacttgacttggcaataccaagcttcttaaatttatatttagtgttttattgataccacaagttcagatattttttgttgttaatagaattcaaggaaataagtaatcttgaatggtttctgctaggtcatagaacagtgatgataaatttctccagattatcagaattcaatttttcactgattcattgttcttcaatttgatatcattttacttttaggtgttacacataatattgcattacttcgagaggtgataatcaactcacgctttgtaaaaggagacatcagcactaaatttctctccgatgtgtatcctgatggcttcaaaggtttgtatgcattaaaatattttagtgttttaaagttgttatttttatactttattgtaatacataatttcactctattttgaaattaaggccttttggcttatattatacttcatttttagaacatgcaagactgtttacattcatgattttgagtatttatggatgactcatgagtgtgataatctgcagtcttgtggagtgcagaattcaaccatgtgaattgttctatgagtccagtgttttggagcaaaacatgtagatagatcattagcctacctgacttcctggtttctgaaaatcaaatcagatttgtattttctactgaggtgagtatataaggaactcttctaaagtgatttttaagagatatattaatgaaaatagcactgaaaatttcagaaaaccagattctggtcctattaatgaaaatctaggaagatgatgattttattctgaaaaatgaagttttcaataaagtaatgagtggaatgtgaaatttaacacagcaaagttatcagcaagcatttccaggtagtagaaaaattgctcatcaaatgggagatagagaaaaccctttagtgagcattcaaaacatagttaacataagatattgagagataaacaagatttagactgagacttaatagaaatgttactcaggtgaaagcctctacctacatttttaatgagctagtgaggtatgaaggttagatagtctgtcccatatttcaagtgttctttgtatccattaaagtgttttaatgtaaaatgactcacattcatattaggagctatatatagattcaggtcaagttgatgtcgttgagttgttgggtgcatttataaagcagttttcagttcagaatttacaatacagagttttcataagactcaacagagataactgatttgaatattgttttaaaactttagtgttatagagttttatcattagtattaaggcaaatgaagaatggctctaagttgggatcttaaaacaaaaactaatgatttattaggttgtttttcataaacttttgaatttttaaaaatacaaaataaaatacaactaggatagtagttttatacttttgtgactattcttttaatatttgttggtttaatgaggctaagaaccccttacgtcattgcttttcattttatccctagcacaaaacatagtaggtactaagtatttgttgaattaatgaaaaaaaaaaaatcttagccataatattgatgagaaaggattactttggatttttttttttttttttttttttgagacagagttttgctcttttgcccaggctggagtgtagtggcacagtcttggcttactgcaactctgccttccggtttcaagcgattctcctgccgcagcgtcccaagtagttgggattacaggcatgtgccactacccccagctaatttttatatttttagtagaaacggggtttcaccatgttggccaggcttgaactcgaactcttgacctcgtgatctgcccgcctcggcctcccaaagcgctgggattacaggcgtgagctaccgtacctggccgctactttggatatttttaatcatttatacatgtatccagataaccagttcattctattttgatcctaacatttagtttcttgtccttcctaaaattttaattaaaagttgtagtacgttttgaagtggacttaggacttccatgtttttatgtctgcctggcaattcagtgatggtgataagataggaaacagtgggcagaaggagaaaacagggaaaaactacagagaacctttagaacaaacattatatgcatgtatgggtatttatatatatatacacacacacaaatacacatttatatataagtttgtctatatgtatgtatggtgaagtatcccagagaagaagaaaatggggcatttaaattttctaatcagagttgattagtatgtgctggacgtttagcaacaatagagaatatcccaaattctgtagagaagggatccccttcaaactcagaaatgtacttaaacctagatattgcagttttctgtgatgcatataatatattacatttctttttttgtaaggaattaacagcttggacaccacaattttgttttttatgcttagaccaatttttaaaattggcatacattgcttttagcaattatttagttgcagccttcattttacatgtgaggaaactagagctcagagatatcagtaaagctaaatgaccagtaagataataatgccaggaattgaacctaggcttattcaactcctatttgagtagtctttgagttatgctggggttcaaattcataaatcacaaatgttttcaatcagggtatgctacatgttgttatattgcctctaaatactttagaaacacactcctatatttgccattcttaatgtctccctcttgttttattttcttattttcatatcagttcattcttctttgagtggttactgtctgtcattcttcttcagattgctgtattttccccctaaatcaggtcttagatattttaaactgtatcgtcttttgactgtttgatatatgtgcccaagagactgaaggaagtggtaactacagttaatccaggatcctctccatatgtttggggccaggtcattttgcccctttggggtttcccatctgcttcccatctgttcagctatcctaggcactattcacaggcaagcacctatttttatgactgcattaaaattttctattgtatatgtttattatcccacatttatttgtatgtagactaagccagttttactagagattcttagagttaaactttgaaatgattgcttctaaaattaaaaaataggatacatgagaaattattcttgtcatctctttagatgtggatgttgaaaagcggtttcccttgattctgaaaaataaatggaacatgaggaagaagatattttaagaactataatttcatttggcctataatgaacattttgggcttatttctctgataccttcctatacttcaaccccaagccccatcgaaagaaattgtcagaattatctcattcttttaagaagttacagatcttctggtaaaaatttcactcaacacaaaaagtatataattaattatacttctcttttttccactgaatttagtcaagtatatctacactttaaaaaatactactatgatatttggactgaattcaatcattaaagtcattcaacaaataattgatataggctctagaagaaaatcaaagatgggtatattttacctgctcttagtgagctgacatcatgagagaaataataatgtaaagtacccactatactacaggacaggataaagtaagtgcctggtaaagatgtaagcaaagtatcttgacagaagagaaacaaaacaaaacaacaacaacaacaaaacaccggaaacccagttccatttgagggaataaagaaaggctttaaggatgaggtagcatttagactattggaatacctctccggggactctctccatgggagctgggctgcacttgtgagagccatgtgtgcacatctttataagccatcctctttgaagttggtagtttgtaatcagccatgaagaaagtatttactgtaaagaaattggttgtaccctgcggcttttctccttcccccacaccccagttgtttgttaagcatttaccagcaaaccactgcctaactctttggcctgcatattgagcagagtccctgatgtaaaaaggaaaagaattactcatctagggaggaagacctagaagactcactaaggacaggtggtgctcagttttagagctgctgttgtaggaggcagatgactgtgcttactgaaaaatgggaagaacacttaaaaatactgaattagaggagaaagacttaatgaactaaaaaactgtgatttttctaaataaaacaattcagcagtcaatgtggaaggtaggatggtcactactaagatccaaattagtgactcaaaggaataaatggaagtatctcaaaatatgcagcaaaaaggtaaagagaatgaaatcatgtggaaaatgatgagagatatggagggaagatccaaaagattttacacataagtgcatactaggagtttcatgaaaagaaaaatggaaatgaaggataactttgaaagaaataatagagatttttttctcactgttcttaagaaagccttaggtattcttggaaagactcactgagattcagactggattaatttaaaaagtaactccactaggcatataaaaaacaaatacttttttaaatcttctaaaagaaaagaaagaagatgcaaggaatgtacagtgagattatgttcatactctataaactggaagttagaaatcttagaatagtgtctgctacataggaaagaatttgactcaagagtactatacccagctaagatatcgtcatcaatataaacaaatttgttttcagttaaataaggattcagaactattttaccatatatactccttttgaggaaattgctaaagaaagtactttaaccagtttttaggtaagatgatagcttaaaaatatacatatttttccccctacccccaaatccactaacttgagttttttaaagacacaagcccactaggaagaagaaaggaaatagcatttggtaaaatgaacagctgaaagatgattcttaactgacttagtaacctaagaaagttgaatcctaagctgacaatgagagaaactgagaagtagctcattaccactgcagaacccttcagaagtctcaataattattagctccagataccctgggaaattcctaaaggtagcactactgacctaaaatatctgtaaaattttctccatatcacttccctcactcttcagagtaaggcgactctctttccctcatcctggtgtaagctttcagattcttctctgcagaggataaaaaccaggggacaccaggcacagttggacaaaggatcgagggaacatggacataataaatgtggtgacactctctgccccagctttgttcctcagttggttcccaggggactggcaggcagactggtactcacagacatgaaagtagacgatccttgaaaaatctaaccccctggtgagatgacctaaagattccccaacaaaacagtccagccagattaccctacagacaaagctgccagtggtcaacaaagccatagcccacgaagagagaacgggcctggattagaatcaggacctctatctgcattatttaatacaacactgtggccgggcacggtggctcatgcctgtaatcccagcactctgggaggccgagtggggcggatcgcctgaagtcaggagtttgagaccagcctgactaatgtggagaaaccccgtctctactaaaaatacaaaattagccgggcatggtggcatgtgcatgtaatcccagctattcaggaggctgaggcaggagaatcacttgaacccaggaggtaaaggttgtggtgagccgagatggtgccactgccctccagcctgggcagcaagagcaaaactctgtctcaagaaacaaaaacaaacaaacacacacccaaaaaacagaaaacactacatgtaatgggaaccagcgcgtagctgttaaaaataaatggtagacctaaaaccactcgggaaatacacaggtcaggcttcttgaaaactgcatcatgccaatgagggtggccagtagcatgagggtcatagtggcatgtcacaaagcttgtaggtgctgttacatggttttgaactccagtaattagtggcttaatgaacaaggagaggagataataaacattgtttaggggttgggacttttgcatgaaattatccccccaaaagtttaagaaggtaagagttagttgtgaggaggaaggtttttcttctttcagtcacaaatacttatagagcctgttgggtaaaagattgtgctctaggctctgggaatacagaggtaaaactgtcaaaaagcctaaggcttttagaaccaagagttgcagctttttccagccatgtcttcactgaagagcccactgtgcccagcctcgttgacttcgcagtagaggctctaagcttgaatgttgtgaacgttccaaggctgggtttaagaaagccttagaactccatctagacctgtaacaagtacaagtgacttgctcctctgaagagtgcttgaggctgcatgtgtcctgcatgtgaggctggagctctcagtccttctgcctcctcaccacctgtattccacatgcacccagcagcacctctcagtcttctctgtcggggttgggggagagggtaaaccaagtgtcagattacagcactcttggtttacgttcacactcgctaaaaggggtaggaagaattggagagcttttaaaatacttaccgcgcccccaagttttaggtgtgtaggattcatcagtaaacagaaaaaggagctgccctcatgggacttacattccagcaggttagcaggcagcatgcattcccagctcccctcatggcagccaggcagggtttacacattagaagctgctcagaaaagggaatgaggtacattcaccttagcttactagcccagaatgcagtgtcagtgtgtctgactcaacaccaagctggtctaccacccccagagggcaaacagtggagaccgttcaaagggagctcaaggtcagagccagggaagacatgccttacttagtatcaggccgcaggggaacttgcagaagtcaagtccactctggcctgtgatcaggagtagcattatgctaaaatcgttgtaagaataggtcagttatgatcagacttcttatacagagcctgttggaactgagtaccccccttttgaagtggaatatcagtaaaatgcttgaagttgatgtgcatcatatcagtttgcctgggagatgtgatgaatgatggtccattttatttgggagacctctctcaatattgcctgagtccatgcactaatagttggttagaccagatgaaatactgattgagcatcttgcagtgaatgggttcccctaatgcattgcctcctcccttgctgatggtatatacggtgcatatgtgtctaaagaactgacttgtaaaggactttgattgtgaaccaccatgagaaatacattttacatcctgacatagtatgcacatataaacacacacaacattttcatgtaaaatactgtgtttaaagtgctatgataatttgtcttcctgcacatgacacattaaactggcttcatgaactactaaacagtttctttacacagtttgataaatatcagtccagaacagttgtattcaaagtgagatctgctgactggcagcatcggcatcaccctggagcttgttagaaatgcagattattaccccttgccctcataccttctaccagtcagtctgctggtgaagtgcacacagcatctttaatccaggtgattctgatgtttggtgaagtttgagaagcactggttctttttacactccagagagcttttgtgattatatatattgatatttaccacattataaattaaaactgaggaacttgaaaatatttattcattcattctgaaagtaatggtaataaatccattacgtgttgacatgcatgagagcagtgatgtcatcacacaatatgtgtcccttggatctgggaacctctgcagtatactcttgagaaaatgagagttaaaaaagcaaatatattttagtagtactatgaaaatcatttgaccttgcaaggactcctggggactcccagttgttggcaggtcatgctatgagaactgttcttctcaactgtatgttttgacaagactgagagcaaatttttgtaatacttcttatatagagtaattatgtaatcatatgggatgttttcatcactgcttaggtgtcaggggaaaatgaggaactttccaatgcccataagagtatggtttattaggctgttgtgaggatctagtatggaattcccagaaccagttggtagatcccatatttgtattatgttttatgtaatgtctaggtttgtctcaaaagagggtggattacctgtgctctccctgcccttcagggagcagatagattacttccctgtggaaaattgtgctgtagatattggaagtatttgtatcttaattttgaatatttttagtcttatttgtattttgagtgattttttagacataatgtttaaattacttcatttcttccaaataagtttaggcaactagtttttttctttttttgaattgtacatttgtttcttggtatctgtgggtgattggttctaggaccctttcaggtacaaaaatccacagaagctcaattccccagtgtcgtatttacatataacttagacatatcctccctgcactttaaatcatctctaggttacttataatgcgtagtacaatgtaaatgctgtgtaaatcattgttatactgcattgctttgaggaaaatgacaagaaaaaaaagcctgtacatgttcagtacagacaacaatacattttttttctcaaatattttcaacctgcagttgtttgaatccatggagggtcgactgtaaaagtagcaccttatggctgacgagccagcattcaagttgctcatactgtcccatttaatactctactatctatatgtagtactctggtaaataaatagttttagatttgtggtgaagttacagagctgtcaaaggatgtgttaacctatagaccctggagtatttgaatcctaccttgactcacaaccttcttgaagaattacgcaaattcttcaatcagtcactcaccccaggcctttgcggccagccgactatcccaggtccagctgtgtaatggtaggaagatactgtgagtgagaggaggagagagattggttggttgattgggattcatgcagagaagcagaagaatcacggcgtgatattctttggatcttcgcaccagaaagcatggcctcatctgtgtccttgaccagccgctctccttttctccagggacaggggcttcttgcacgctatcctcacttccctcagcagggaagctgggctgggaaaggacagagagaagcagatgtgaggagcttatgcttttcctggagatctctgtgtggatggttttttctttttaattgtctttgttctgtgcatctgttgaatatcttctttcccaaattaaacttctttcccaatataaacttcccgtgagcaggattttgttgtcttatttgaatggtcttgcttcctcaatgtccgcacaccccagtgcctagtacaatcctagctgcataatagatgccctataaaatacttgtttgaatgactagtaattctataggagagaagcacagatgttaaaataaatgattgattgattgattggttgattgatttccctcaggacacatgctaaccaagagtgagaagaaccagttattggcaatagcatcatcattgtttgtggcattccagttaagagcacaacattttcaagaaaattcaaggtatggtagatcatttaaaacagaataaatgagcagaacaatattgataatccagtctacataggaaatactaataaaagatgtggctgatctcagttctagagatcttatgggtctttggagaagtataataaagtcacactgtataaatatgatattgcttacattttgtttaaacaagtttttttaagttcagaaaggataaaaggatcttggcccttttaatttggacataagaagatagtctgaaatccgatgggaaatccattcgagtagtttgtgtttatgatttctgttttatttacttatcttgaaaaacgtttggagaagtatatttaaatgtaggaatgaatctgggcagttaaaaaaatatatatcagaaactagtgaacacacaagaaggaattaacaccaggttgagttagtcatttgtgagacacaagtgtgccttttagcttcctagtgacccaggtaaaaggagaacatgctttatatcagggtaagtagaaacaaaacctcaatgccattggtgcttctagagagaggattgtttattatgaatgtgtgtttacttgctggagcaatccctttaaaggaatcatgctgttgataaattgttacttcagtttcttttcctttttactttttcacaagaggaagaacaaagtttaaaaaaaagaaaaaaaaagatggaaggtgatgaactagctttgaaaagcacaaatcagaaactgaaattacttctgaagaattaggtagaggagaaactaaattggatttaggctgtatcttagtggctaatgtggttttattcaggaaatctcagtgtagttggtactcttcacttgttctctttacctagaaagaataggaagcttacagtgtatctttttaaaagttatgatttggtagctaccagggagagatgagaagatatagaatatcagtaaatgactgaatgactggacggaggaggaaaatggtcaatagaaccgtgaatctgcttgtgcatctgtttaatatcttctttcccaaattaaacttctttcccaatataaacttcctgtgagcaggattttgttgtcttatttgaatggtctttgctcccccgatgtctgtacacctcagtgcttgttgtttggttgtttcccccccacatagttgtgcggtctagtatgggaggcactagccatgtatggcaattaagattaaagtgaatggaagaatccttttcaaagttaccggaaacgtggctacatttcaactgttccatagccacgcgtggttagcagctcctgcactgggcaactctaagaggctttccaccacagcaggtgtgtttccatcaagttctgttggacagcatttgtctggagggatatgtgtgtaggagagaatgttgcttttgttttaaaacctgaatttcatattttttattcttttgataaatgcagtattcagatcctaattcctttaccttcagatgttatttggaccttgattatttcagaagttctgagtgtagctaaatatgactggtttgatttttaagaaatgtatgcaagttattttcagagagtgctgccttactgtgtggaagaatctgaaaagggcttaaaaagatggagaataaaaattacctgtaatcccataattattcaataattacttttaatgttttggtagaacccttcaaagtatatatatatatatatatatatatgtatttatgtgtgtgtatatatatgtatttttatatacatacatgtagcatttatactttgcataattagagtcataaacctgggaatatggtttgaattacttgtgcaagataaacagcagtatattgaacacccatgcacacattatctagcttcaatgactgtaaaaaatctatcttccttgtttcatttttacctctacccactccacactttccccatttgttaattttttaaggtaaaatatacaaacacacatatacacttcttacctgtacagtttttgtttttgttttttgagacagagtcttgctctgtcgcccaggctggagtgcagtggtgcgatctcggctcactgcagccttcatctcccgggttcaagcgattctcctgcctcagcctcctgagtagttgggactacaggcatacactaccacatctggctaatttttttttgtattttcagtagagatggggtttcaccatgttggccaggctggtcttgaactcctgacctcaggtgatccacccacctgggcctcccaaagtgctgggattataggcatgagccaccgcgcccagccttacctgtacagttttaacaaagggatgcttgtgtgtaactcagacgactctatctttacatcgtctcttccagtgcactccctgcctccttttgcttgtggtgctacctgcggtgtgatttcttcagattgcttttttggtaaactttttttttttcttttctttttagagagatgaagtcttgcttttgtcgcccaggctgaagtgtagtggcacagtcataactccctgcagccttgaattcctgggctacagcgaccctcctgcctcagtgtccctggtagccaggattacaggaacataccaccacgcctggctaatttctgtattgtttgtaaagatggggtttcaccatgttgtccaggctagtctcgaactcctgggctcaagtgatccagtccaccagccttggcctcccaaagtgctggaattatagacctgagctgggcgaaaccttgtgtctgctaagtacaaaaattagcgggggcgtggtggcgggtgcctgtaatcccagctactagggaggctgaggcaggagaattgcttcaacccaggaggcggaggttgcagtgagccaagaatgcgccactgcactccagcctgggtgaaagagtgtgactccgtctcaaacaaacaaacaaataagctaaacaatctaataaaaaacgggcagtaggtttgacttagactttttatcagagaagataaatgaatggcacataagttcatgataagatgctcagcatcatcggtcagtggagaaacaaaatcacaaatctataccactacacacccactagaataatatgcatcaagtaatgagtgggtaaataaaaagtggcatatccatactatgagcttattcagcagtaacaaagaataaacagctacattcactaatgtgtgtaaatctcagaaataacatgtgaagagacagaaaccagataaagaagactatgtaatgtatgacttcatttatttgaaatttctagggaaggcaaaaagtataaagaacaaaagaaagatcagtggttgtctgggtctgggtatgggagcaagattgactgcacatgagttttattgttctaaaactggattggggtgatgggtgtacaactgtatgaatgtattacaatctcacttgatcttagccaaaaggccgagaagtgatataaatgtattacaatctcatcagactatacaattaagatgtatagatgttattggccaggtgcagtggctcatgcctgtagtcccacactttgggaggccaaggcggactgatcacatgaggccaggagttcgcgaccaacctggccaacatggcgaaaccctgtctgtactaaaaatacaaaaattagccaggcttggtggcgcatgcctgtagtcccatctactcaggaggctgaggcacgagaattgcttgagcctgggaggcataggttgcagtgagccgagatcacgccactgcactccagcccgggtaacagagcgagaccctgtctcaaagtaataaaaagtaaaatgtatagatgttatacaagtaaattatatcttaatgcaacttaaaaaactgtaaatgtggtaccaacaaagggcttgaaagaggtgggaagtattatgagaagtgttaagatgatggaagatacatgtaaaaataaattgtattcgaaacttgagtagaagcagatattaaggagtcaggttactgacttggaagacctggtggatggtggtaataacaaaagtgcaagagcagctttgaaaagaaaatatgagaagttccatttaggcagttgagtttgagatccttgacaggcataattgtagctcctaaagacttagcaatatgatatattcctatccctttgactgtttcttctttaataataatatatatgcccctttgagcccattaggaaatacttggggcatgcttttgtactcattagttccatgatttttttgtaataatcaaatgcacacagttttagacttcaacggtgttccttaatgtgtgctccatagagcgctagtttgggggagtattaaaatgcattacttaagaaaatgtttctgtgtttaaataaacgtggaaaatcccttgttaagttagaaacctcttagagactgtcatacaggcacacctcatttcattgtcctttgctttattgcacttctcagatattgcattttttacggattgaaggtttatggcaaccctgcattgagcaagtctttttgtgctgtttttccaacagcatgtgttcactgtctctgtgtcacattttggtaattctcattacatttcagacttcatcattattatcatatctgttttggtgatctgggattagtgacctttgatgttcccattgtaattgttttggggtgccacaaaccatgcacgtgtaaggtggtgaacttaattgacaaatgtgtgtgttctgattcactgacctggccattcccagtgtctctcactctccttgggtctccctattccctgagataaagtaatattgaagttagactaattaataacaaagcagtggcctctaagtgttcaagtgaaaggaataagtagcacatctttcactgtaaatcaaagggtagaaatgattaagcttagtggagaaggtatattcaaagccgaggcaggctaggcctcttgtgccaaatggttagccaagttgtgaatgcaaaggaaaagttcttgaaggaaattaaaagtgctattccagtgaacacacaaatgataagaaagtgaaacagccttattgctgatatggagaaagttttataggtctggatagaagatcaaaccagccacaacattcacttaagtgaaagcctaatctagagcaaggccctaactctcttcaattctgtgaagggtgagagaggtgaggaagctgcggaagaaaagcttaaagctatcagagcttagttcatgagatttaaggaaagaagctgtctccataacataaaagtggaggggaagctgcaagtgctgatgtagaagcttgcagcaagttatccagaagatctcactagcatcatcgatgaaggtggctacactgaacagcagattttcaatgtagataagacagccttctattgaaagaagatgccatctcatactttcatagctagaggggaaaagtcaatacctggcttcagagcttcaaagaaccagctgactctcttggtaggggctaatgcaactgatgacttgaagtagaagccagtgctcatttaccatttcataaaccctagggtctttaagaattatactaaatctattctccctgtgctctagaaatggaacaacaaagcctggatgacaaaatgtacatttacagcatcatttactgattattttgactccactgttgagacctacttctcaaaaaaaaaaaaatttttttttcaaatgattgctgctcattgacagtgcacctggtcacccaagagctctgatggagaagcacaaggagattaatgttgttttcacgcctgctaacacaacgttcattctgtagctcatggatcagggagtcattttgattttcaagtcttattatttaagaaatacatttcacaaggcgatagctgccataaatagtgattcctatgatggatctggacaaagcaaattgaaaactttctgggaaggattcaccattctagatccccttaagaacatttgtgcttcaatgggcaaaataaaagatcaacattaacaggagtttggaagaactggctttgaggtgttcaagatgtcattgaaggaaatagctacagttggggtggaaatagcaagaaaactagaagtggaacctgaagatgtgactcagttgctgcaatctcgtgatagaacttgaatggatgagagttgcttcttatggatgagcaaagaaattttgcttaaaaagcaaagtttttaagatggactctgcttctggtgaagatgctgtgaacattgttgaaaaggattttagaatattacattaacttagttgataaagcagcggcaagttttgagaggattgactctaattttgaaagaagttctactgtgggaaaaatggtatcaaacagcatcacatgctacagggaaacctttcatgagaggaagaatcaattggtttagcaaactttattgttgtcttattttaagaaactgccgcagcctccccagccttcagcatccatcagcctgatcagtcagcagctaccctctatcagcaaaaagattatgactcactaaaggctcagatgagggttagcatttttttagtaataaagtttttttttttggagatggagtctcgctctgtcgcccaggctggagggcagtggtgtgatcttggttcactgcaacctccgcctcctgtgttcaagcagttctcctgcctcagcctcccaagtagctgggactacaggcacatgccaccacaccccactaatttttttgtattttttagtagagacggggtttcaccgtgttagccaggatggtcacgatctcctgaccttgtgatccgcctgcctcggccatccaaagtgctgggtttacaggtgttagccaccacgccagcctaaactactttttaattaaggtttgtacattgtttttaagagctatcgcacacttaatagactacaacacagtgtaaacgtaacttttatacacattggaaaagtaacaaattcatgtgacttgctttattgaaatacttgcttcattgcagtggtctggaactgatctcacagtatctccaaggtattcctatatactaaaatgcattctgaaactcttaagagcaggatatagttggactcttacctacactctttttttcttgtgaaaacctttttcctaaaagctctttgaaaaattaatattccaatgaatgcttttgggaaacacagagtatgttatattgtgatttgtagtgttttagatagtttaaacacaacattccttagagattgttgaaatatttagggcaattgctttataaagtggaggttaagaagcaatctttatagtctttgctaatttctagctaaaattgtaaatgtgataattgctacattaaaaaatttaagtatcttattttttaactcattatcttttagaagttagaaacaaaatatgtatttatgaaatatgtagactgcaagttcacttatccagataattgcacatttattttctatacaacaagcaattgttcatttttggtgagtttattttctgttgaaaaaaaggtactatcacttatttagtattatcagtttattgtaaaattgctacaccctataacagtgtagagctgtaacatttagtaaatatagtgttcttcttcaggaagcataatcttgtgtagctaagtgaagctatgtttctggcttgcttactgaggaggtccttgacacctacatcatgaaagctgatgtacggtgtttgaaccttcacattttggctttagagtcatgttttcacaatcggcttgggaatggattctaagagtcaccctccaggtgtggctctgtattgctttgtcatgggtgtgtccgtgaaatgtttttccttccaaaccagtagcccacagcccttcctttgtgttgcttgttttggctgctgatcttattttcccaatttctctatgggcttcactctttcatcatttatgacttggaaaaacacattaataatacatacccctagtatttggatagtaaaacaatagtggttcattttagaaaaaaagaaaagttaatgtcagaaacaatagccattttttgggggatgactataaaatgaatttgatgagctcaatctttttctgacttaccatgaaggcttctttttaataattattcttaaacacttatattgacagaaatgaatcattaaaagctagttatattaaacaaccactttttttaaaagctaaaatgattttgttgacattgtagtttgatataataatttgtttcactaactggtaatgattggaagaaaaaatagtaaaggtaacattttaatcatttttagtaatctttatttttgctcaaaatgtctgttttttcttggatctggattcagctttcttgagaatcagcttttactttccgttttttttcctttctttctttctttctttctttctttctttctttctttctttctttctttctttctttcttccttccttccttccttccttccttcctttctttcttttctctctctttttctctttctctcttcctcccttcctccctttcctttctttcttttctttctttccttccttccttccttcctttcttttcttttcttttcttttctttcttttctttcttttctttctttctttcctcagtcttgctctctcatccgggctggagtacagtggtgtgatcttggctcactacagcctctgcccgctgggctcaagcagttctcctgcctcagcctcccaagtagctgggattacaggcatgcaccgccaggcccggctaatttttgtattttttgtttgtttgtttgttttgagacggagttttgctcttgttgcccaggctggagtgcgatggcgcaatctcagctcaccgcaacctccacctcccaggttcaagcagttctcctgcctcagcctcccaagtagctgggattacaggcgtgcaccaccatgcctggctaattttttttgtagttttagcagagactgggtttctccatgttggtcaggctggtctcgaactcctgacctcagataatccacccacctcggcctcccaaagtgctgggattacaggcgtgagccaccgtgcctggcctaatttttgtatttttcgtagagactgggttttgccctgctggccaggctggtctcaaaatcccaacctcaggtcatccacctgctttggcctcccaaagtgctgggattacaggcatgagccaccacgcccggccactttctggtttctactttatcctcataatttccctcttggtatttgagcaggggttaaagactcagaaaaagaaacaacttcactatggcctataatattaatggaaatacttcagcctgaaaggttaaaataaagcactccctttggtggaggatgactttggctgcatggaatcagtgtactttgtgctcaggcttaggagaacatatcaagtatcacggctggctacacagcctggtgtcagtttaactctttcagccacagtagcataacgggaaattacttcctcttgggttctttgtatgtgcagtcattgtgtctgcatttgtattgtattatctttcctcatctggcttcctgataaaatggagaatcgattttttagtgatttctgcctagcagagacaattatctgtttatttttctttgcctttcctggtttcagatatagaatttattcacctgttattaaattttcaattagatgataaaagtttaaggtttttgaaatatgatcttaaccactgaaagatgagtggggtgagaaacatagaaaaaagtaaccgtgtgaaaataattcccaaggaaaagccggtattgttgaacgggtacatactggctcttttactaagatgtcttctgaattaaaagagcatgtgaaattataacacatttatacgtcaatgaaaataaaacaacttatcataactcgtttcatactctcagataagccacttcactgtgacaatgaaggtgacgtgatacctaactatacaataaaaaaaaatagcactttaagtatatatttacaaacgtatgtatacactctttgtgtttggaaatagctacgttcatttgagcaaataaatcccctaaaagcaacaagatgggagaaaacattaactcaatcattatcacttaagcttgccttactttttactgtctctgttatgatattttcagttacttaatatgactgtgttgaagatggtttagaaatctatgtgagattaagtacaagatactaagtggataagaaagcacatttacatatttttgcttactattacattgtaaaatatttttattttgatcctactataagagctgagggaaaggcagaatagcctgattattgctggagaatttctctgttccctaccatgattccagaagctcttgcacacttcatcagtattattgtaattctttggctgcaggatatttggcagctgttgcaccccactggcaaatcctattcatacttctttcccattcaccattgccattggagaattgatttctctctcctctactctaacctttcccaattcattttggattgttcaatgtgaaacattttaatttcatatcatacagctattcagcttacaatcccttttttaacctgtcaccagggtaacagcatagcatgctttctttaggcaatcaagtttttatttcacatgcttaatgttgcattaaatgtttgcattttgtttaacccccttaaatagtttgaactctggatatgttttatagggtaatgaaatccttgatttttgaattgaaactaaatcaacaccatcagtgcatttataataaaatgtcaaaagattaatttccataatacaaagattattattaaaaacgcaagttagctgatctgtgtaaggcaattttctgtaggtaatggaggaatatttgtatatattatatttgtgttcagccttgttccaaaaaaagatttaaaagtggtttagagattgtcagtgagataagtaaaaaacttaaaaaaggaatagatttggtgcaaatgggaaaatatatcttttgaacccattatttgatttttcagtataatgcttttttctctgttcgtatatatgaagatttgattacttgatttttcagtataatgcttttttctctgtttgtatatatgaagatgtgattacttgatttttcagtataatgcttttttctatatttgtatatatgaagaccataatgatttatgcatgtggagatgggtgaagtaacgagatgtactagaatgagattagacatcttttctaggagaccagtgtgggcattgtgtgctttaatatctcttcatcagtttactttagaactaccttttccttaaaataagtaatttaataataatagattagtgaagataaaaatgcatatgtttagatattgattatttgacttgaattggatagacctcagtttccctttacagaactacctagtcatcttttcagccttatccccaataatatgttcaatgaaatttgttctgtgaataaatcctgtgatatttggaaaatactaagaaatgtgtaagacaaggtagagcagagactagcaaaccatgttgcttggaagcatggttcaaattgtaatgcccggggtaaccactaagaaaataactttaaaaaatagtattagtaaaagaaaagtcaagggaattaaaataagacaatagaaaacgttgatttaaaacaagacaataataaaggaatagagggagaaaaaagatatgacatatagaaagtaaaaagcaaaatggtagatgtaaatcctacctgatgggtaattaattatattaaatgcagatggcttaagcctatcaagagcagatactgacagaatagatttaaaaatatgatcaaaccatatgctttacaagagacacactttagagttaaaggcataaataggtcaattgtaaaaggatggaaaaaagtatcagacagacattgtattcgtaatattattatcagtattttattactaataatgctgatgtcaaacaaaatagccttttttttttttttttgagatagggtcttgctctatcacccagtctggagtgcagtggcatcacaggtcactgcaagtttgaactcctgggctcaggtgattctcctgcctcagcctcctgagtagctggtactagagtgcatgccctaacatttggctatatatatatttttaaatagagatgaggtcttgctatgttacccaggcaagtctcgaactcctgggctcaagtgatcctcccacctcagcctcctgaagtgctgggattataggcatgagtcaacacacccagcctttttttgtattttttttttcttccagagacagggtcttgctctgtcacccaggctagaatacagtggtgtgattatagctcattgctgcctctaattcctgagctcatgtgatccttctgccttagcctcccaaggaactaggactacagatgtactccaccatgcccagctaatttttaaaaatctctttagaggtaggtttttcctatattgcccaggctggtcttgaactcctgacctcaaatgcctggactcaagtaatccttacgcctcagccttccaagtagctgggattacaggcatgagctgccaagacaaaatattgttcaagacaaaattattgctagagacagaggggtattttataatgataaaagggtcaatccatcagaaagctataacaagtataaacatatatgtacctaataacacaattcccaaatatgtgaagcaaaactgagacaaagagagaaataggcaattccacaatacatcactttgaaaaatggatagaacaactagagagaatatcagcaaggaagtaaaagtgtcggacagccctatagaccaaatagatctaacagacatctctagaataatctctccaacaacagcagaatatacctgtctcaagtgcacgtataacattctccaggctagaccatatttaccataccatatactaggccataaaacaagcctcagtaaatttactagaattgaaatcatccaaagtatgtttctgacaaattaaatgaaattagaaagcaacaaggaaaatttgggaagttcatacatatgtggaattaagcaatgtactaccaaataaccaatagatttacaaaattacagaggaaactagaaaatattttgtggttaatataaacatcacaacatctaaaaacgtgtgggctgcacataagcagtgcttagagggaaatgagagctgtaagcacatgtattaaaaaaagaagaggccaggcaaagtggcttacatttgtaatcctagcactttgggaggctgagacgagcagattgtttgagcccactagttcgagaccagcctgggcaacatggtgaaaccctatctctataaaaaatacaagaatatgctgcgcatggtggcacgtgcctatagtccttgctacttgggaggctgaggttggggaattgtttgagcccgggaggcggaagttgcagtgagccaagatcgtactactgtactcctgcctgggtggcaaagtgagaccctatctcaaaataaaagaagaaataaagctgggtgtgggtttggtggctaacgcctgtaatcccaattctttgggagattgagactggaggatcacttcagcctagaagtttgagaccccatctctacaaataataataataataataataataataataataataataataataaaataattcgctgggtgtggtggcacacacttgtaatcccagctactaagaaggctgaggtgggaggatcggttgagcccaggaagtcagggctgtagcagtgagccaagatcatgccactgcactccagcctggctgacagagtgagaccctgttgaaagaaagaaggagagagagagagagagaaagaaagggagaaagaaagaaagagagggggcggtgggaggagggagggagggagggagggaaggaaggcagtcaggcaggcagggaagggagggagggagggagagaaggaaaggaaggatcaattaccttatcttccacttcaggaaacatggaaaaatagagcaaacaaaagcagagggaataaaatactgaaaactagagtacaaataaatgaaatagatactagaaagcaatagaggaaatcaataaaagcaaaatgtgtttgttggaaagatcacagaaatgacaaacctgtagataggctgaccaaaagaaaaaaaactgaaattgtaaaatcatgaataatagggggtatgcctactgaccttacagaaattaaaatggtcataagggaatattgtgaacaattgtttaccaataaacaagataacttagataaaatggagaaattcatagaaagatacagactgccaacactttctcaagagaaagtaggaaatccgaatagacttatcataagtaaagagatggaactaatcgttgcaaaacttcttagaaagaactcaggaccagatgacttcattggttaaaaaagttaaaggaaaattacttaatactaatcctcacaaactcttccaaaatcccaatttacaagaccaatatcatcatgattccaaaaccagataaagtcattgcaagacaaaaactaaaggctgatatccttcttaagtattaatgcaaaaattcccaaccaaatagtggcaaactgaatccaagaatatatacagtgatatacatcataaccaaatgaggtttctcctagagatacaaagttggtttaacatacaaaagtcaatcgatgtgatacatcatattaatagaataagagaaaaaaaccacaggattatctcaaatgcaaaaaaaaaatctgacaaaatccaacagcttttcattatgaaaaacactcagcctactcggaatagaaggcaacttcctcagactgatgaggagcatgtgtaataaacccacacctgaaaataagggcatctagattggagagaagtcaacttacctctttttgcagatgacatgattttagatgtagaaaatcttgaggaattgacaaacaaatctgttagaactaatgagtcctggaaggatacaggatacaagaatgatatgcaaatatcaatttttgtttttatacagtggcattgtacaagccaaaaatgaaattaacaaaacaactctatatagcaccaaaaaatatacaatacttaaatgtaaattttaaacaagaaatgcaatacttgaacactgaaaactataaaatgttgttgaaataaagatgacctaaatgaaaaacaccctatgttttgaatcagaagacctaatattgatcaccaaactgatctacagattcagcacaatccttactagaatcccagctgcattatttttggaaaaatagacatctgattccaaaattcatatgaaaatgcttttgcattgtaaaagaggaatgaagttcagaggctcctacttcccgatttcaaaacactacaaagctacaataatcaagacaaagtggtactggcgtaagcatagacatgttgatcaatggaatagaatcgagactccagaaataaattgttatatttacagtcaattgagttcagtaaggataggaagaaaattgaatgagttaagattaatcttttcagtaaattctgcttgggcaattggatatgcacatgtaaaagaatgaagttggtctccttcctcacaccatacataaaaatgaactttaagaatcatagacctaaatgtaacagtgcatacaacaaaattcttagagaaaaacataggagttaatctttgttacgtttggttaggtaataatttcttacataagatgtcaaaagtacacgcagcaaaagaaaaattagataaattggacttcagaatttaaaacttgtgctttaaaggacatgatgaagaaagtgaaaagacatccctcaaaatgggagacaatatttgcaaatcatatatatttaatagtcttttgtctagtatagggaattcttacaacttaataataggacaaatgatccagttaaaagataggcaaaggacatgaataaaaatttttcaaaaaagatatagaaatggccaataagcccataaaagatgctctgtatcattagttgataggaaaatgtaagtcataaccacaatgagataccacttcacacccatgaagtggtgaagatgtggaaacatgggaaccattacatgttcctggtgggaatttatgactacagtgatatgaacttgggaataatttgacagattcttaaaatattagacgattaccacatgacctagctattccacttcctggtatatacccaagggaaatgaaaccatgtgtgcacagaaatgttgtatacaaatgtttatagtggcatttttcataatagccagtggaaacaaccctaatgtccttcaaatgatgaatgagtatataatagtaaataaaatgtgatacgttcatagaatggattatttttcagcaataaaaataaatgagctattgatattttctgcaacatggatgaattttgcaaaaatgctagatgaaataattcagtcaaagtagatcacaaattttcccagaataagcaaagctatagaaatcgaaagtacataacagttgcttagggctgaggaggggaatgtagagtaactgctctcgtatctaatgtttcccttatgaggcaatgaaaacgttttaaagttgcttgtggggatggttgcataactctgtgactatactaaaaaccattaacttgtacacttcagatgggttaaatgtatgatatgtgaatttcatctcaaactgtttaaatgtatatagtctgttacacattttatatttaagaatttgttttcctaatggtataatagatgttcaaattttaggaattaaatgaggcatttcttccttctagtttgatggagtctttgagaatatttcttttcaaattgtaaaatatgtttctatgtctgctctcaatttagtgcaagagtagctcttgggggtagcaatatcaagtgttcctgggctaccacctggaaggtggaagtagtagatgtatgtgaacccgcgttcttccatcttttctttcctcttctgccttgaaatgcaagtgacataaaattaaaacaacacggaaaagtttcagttcctacaatggcagtgtagtgtattttcaatgaattcctttccagataaataattataaactctggacaaaatataaagcacaactatttgaaggctgtcgatgtacaaccaaatacgacccctaaaagaagaaaactacaccagtgagatgcacatttatgtggcttttcctctgaaagcagtcactattgcatgcattaaggcatggctgtaactcagttattggttttaggtctcagagaatgatgttcagtgttgtcagaactgctggaaattaagcagggatatcatggcagaaagggagcaacagagtgaagagttccatatgtgaattcaggttctctcaaattgttggttgaccctggaaatgtgcgtaacaaagaccccagggatcccagaagatcccagaactgctggaatgctgaatgaactgagctaaaatttcagttgcctaccatggttatgataatgttggaatctgaatctcatcaatttgaggtacttgtaaacaccttgagctttccattaaaaccctggaaggaccatgccttgggagaaaagactgtttctggaataaatggtttggactttttatttattgagagcaaaaccaaatagttcctagtacaacataaaagtgagcctccacaacttcaggactggtaactagcaatgtaactgcctgctgtaataaaaatcagtacttttcagagggagataacatgatgagtgaagtctgacaacatctccacaatacagtttacttggcatgcaatctaagaataaagacaactataatccagaggaaaagcagtcaacagaaatcaaccgtgagattactaaaatgtttgtttcatgggcaagagctttaaagtagctattaaaatcattttcaagtattaaagatgaaaatgagggaaaaatgggaactatcagcatagaaatggaaattaaaacacactactaagtggaaattccatatctaaaatgtcctatatctgcaatggataatttgctggataggctgaaaagcatactggtgatggcagaagaaggaataggtaaccttgaagatagaagaatagagattatgcaatctgaaaaaagagaaagaaaaatgtgtttaaaaaattgaagagacacaaaaggacaaaggaaacttttggaggtaaaacatgtttattaccttgattgtggtgataatgtaatgaccgtatgcatatgtccaaactaatcaacttgtgtgcattaaacatgctgttttttaaaatgtcaaatacacctcactaaaggtgtttagccgaggtgggcagatcacctgaggtcaggagtttgagaccagcctggccaacatggtgaaaccctgtctctactaaaaatacaaaaaattagccaggtgtggtggtgcacgcctgtaatcccagctactagggaggctgaggcaggagaatcacttgaacctgggagctggaggagcttgcagtgagctgagatcgtgccactgcactccagcctgggcaacagagcaagactcctcaaaaaaaaaaaaaaagaaaaagaaaagaaaaaagctgtttaaaaaaaaatggaagacagcctcggtgacttgtgggcactataagttatcaggaagcatgtattaggaaggacaaaaagaaaggcaagagagtgaagaaacttcagaaaaaatatttaatgttgtcttcttaagattgggaacaagacaaagttgtctgtttttatcgtgtttatacagtattatcctggagatcctagccagtgcagttggaaagaaaagaataaaaggcatagaaatcagaaaggaagaagtaaagtcatttctatttacagaggtcataattgtttgcatagaaagccttataagaatctataaaacaattgctggaactaacaaatttagcaagattacaggataaaaaggcaatcaaatgcaagttgtatttgaataaactagcaacaatgggaaagtgaaaattaaagttccacttaacatagcataaaaataggcaaagcagacaccgtcactagttagagtatgaaggcatgcaagaaataacggagcctaatgattgcaaaggaagctttccacaccttaattggttacctaagaaaactctaaggagtctgccatacaatgaataaaactaaggcaaaaataggcataaagttaacaaaagagattcatgactaccacactttatgaaataaattaaaaatcagaagaagtaagagttatatcctgctcatggactggaagagaaaatattaagatgtcacttctctctacagtaatacagattcaatgcaggcccgatagtaattctattgggattgtatctcagggaggatgtggaagaaattggcacattgattttgaaatttctatggaaatgcaaagggacttgtattagtccattttcaccctgctgataaagacatacctgagactggacagtttacaaaagaaagaggtttaattgaacttacagttccacatggctgaggaggcctcagaatcatggacgaggaggggcaagtcacatcttaagtggatggcagcaggcaaaaagagttttgtgcagggaaaccccccccttttttttttctttaaccatcagatctcgtgagactccttcactatcatgagaacagcataggaaagacctgcccccatattcagtcacctcttactgcatccctcccataacacgtgggaattcaagatgagatttaggtggggacacagccaaaccatatcagacctagaatagctaataggaacaaagttgcagtacttggtctacaaattttcctgaaatgggctcacccctgtctcctaccacacaggaaagttagagatgcatcatagacagatctacatgtaaaacatctaaaacatgtgagtatatcttctgaaactttgtatgtaggcaaaaaacttcttagcaaggacacaaagcactaaacataaaaggaaaaattagtgagttagattttgttaatattaaaaacttccattaaaactgtaaaaagataccactacatacctattagaatgtctaaaatccagaacaccgaacaccacgtgctgctgaggatgtggagcgacaggagctctcatgcattgctggtgggagtgcaaaatggtaagccactttagaagacagtttggcagtttcttacacagcataaccttaccatataatcaaggagttgtgctccttggtatttaccaaaatgagctggaaacataggcacacactaaaacctgcacgtgaatgcttacagcagttttattcataattgccaaaactgagaagcaatgtccttcagtaggcgagtggataaactggtatgtccgtacaatggaatattatttagcaataaaaagaaatgagctactaaggcatgaaaagacagtggaaacaaatacatattggtatggggaaaaagctaatctgaaaaggcagcattctgtatgattccagcgctaagtgacattctgaaaaaggcaaacctatggagatggtagagatcagtgattgccaagcattcgggggagggaggggaaataaataggtggaacaggggacttgtaggcagtgaagctactctgtatcatactgtaattctggacacatttcattagatatttgtcaaaacccacagaatgtataacacagtgaaccttaatgtatggacttcagttaacagtaacattgatattggcttatcaattgtaacaaatacaccatacaaatgcaagatgttcataatagaggaattcatgtgggggaggatgtatgggaaattgaaattctgttgagtttttgtcaacctaaaactgctttaaaaaataatgtctttttttttttttttaaatctgctgaaggaaagacattgttaagaaaattcataagcaaaccacagaagagaatacttgcaatacataaatctgacaaaggccttgtatccaaaataaagaactttcacaaatcaataaaaataaggccaatgacctaataaaaatgggcaaaaacttgaatataaatggccactgagcaccataaggtcctcagcattactagtcatgggggaaatatacatgaaactatgataagatgcggtttcccagcctctagcctggctagaattagaaagactgacaatgccaaatggtggcaaggatgtagagtaactcattgcagtggaaacatggaaatgttgtaatcttttggaaaacaatttagcaactcatataaaattaaacctacatttagcctacgacctctactccctagattttttaccccccaagaaatgaagacatacctctttaaggggggaaaaagcaatcaagtacaaagaatatctacagtggctttgtttataacagccccaaactggaaaccaccaaaaatgtccatccacagaaggatgaacttattttggtgtgttggtacagtaaaatacttctcagcaagaaaaaaaggatgaactattcaacaacatggatggatgcacctcaaaaacattatattggtcaaaaaagccacagttttttttggagtctgttcttgtgaagctcagaacaggcaagcataatctctggttgactgttagtggcaggcagagccaagcgactggaagggtgaatgacagaacttaagatcttggaatttgactgtatgttagttgtatgcgagtaaaatttaaaaaaaaataacagttgctgaaacaaaagagagggatttcagatatttctgcacccaattatggtaacaataataactaatttagcatttatgtgccaaacactactctaagcattttacaccttttatctcatgtaagcagcatatgggttaggcattcttattatctttgtcttgctgatgaggaaactgaggcacaaggaggctaagtaagttgtggatggaggtcacacagcttttgtaggtctgcacttggtcagtgagacatggggtctgctggggtgacagctgtgccacagtgcctttcctggctaatcatgcccagtgtctaaattgagaaccttaagcccttatcggtggaagaaggaaagggagtatgcataatatttaaatatatgagattatgagtaacattacgtattctatcctagattcagatgtcatttgtgtaattatttgtaatgctaataacaccaaacttgggggtgttccctgtttctcagcatgattatgtgatacagactcttccacacagtctcatgtatttgaacatacacattttcaattgcatgtaggcagaattctaatcctcctctatgccaattcctagctttgaagaggttctctgaaaatgctgcttttatctttcttctgcagtgatgaactttaatgttggagtgttgtaagttctcacataataaggctcagatttttgtttggtttggcagtagacttctgtttaaaattcctttaatctgttcattctatgctttttatattcattttaataactgatggctctgtaaagaattttttttgaatttattgcactagttaaaaaactactaaaacttgtacttaactattcctccatctcaacgttctaaaagtgagttttccagtgaattgctgaatttttatcttccctgggagttgttcctccccttccccaaccctggggaaataagaaacaattcatatactagatctaaagtttcattaaaattgcttatgccctgtctcaggcattttaagtgggccatctgtctaaacatctctctctccttttttttttctgatcatttcctcgacttattcatgagccatgggagggctcctttgtagtctccatgtagctggttctgtctacccccactgaatacatctatgtgcttgcataacatatcttttcaccgtgctggaaattctctgaacttggttcagatgaatggcccactttctgaaggcctttttcttcctgcaaagatttgtatgcagaaactgacctcagtggccatggaatgcagcatattattctcgatcattttacagcccacccactgtgaaagttatgatgaagcatttcttaatgattccttgaccattagcattgttttaactcagtattttacttctaaagaggtgatggcacaacaaaaaccagcttttttgagtgtctgataattatggtttaaaatgcttataatcctttctaactgaagatgctgagagtttttatgtttatacagtcttcttttagcaaatgacttgtaatagcaaagtatttactcaaaagcacccttttgagtaaaatattccagtaagttaaatgtattagtattaatagtgactatcagctgacagttcttcaccatcaaatataaaaaatttagttatgtcgagcatattcatcctggctggctgatgataaagtggacagacctgggttagagctattattttatttgctttgtgagtcactgtttatgtgagttcttttttactggggtttttggtttttgtttgtttgttgaagaaataacttaattggtatcagctttgcaggtgactaataagttgcacagattaaatttttggtcagatgacagcatctttcactagaaatgtacttcgttaaaggaaactgtatcattactatggtgagttgaagttctaagaccttttccttattgtcagagagttgttcataaaaatcttctttgagactattttgaatttaatggatctgtgtaattcttttctaaacatttagcacataattgtaggtaattgttactatcataaatctgtctgtgctggttaaattaataagaatgtttcaaagtaagtattataaatgtattttcagtgattttgcagaaatagagcatgcattctttcaggtttgtattttttaaaatttatagcttatttctattgcagagcatatttatatctgccagttaactggcatatatgcccaacccatccattttatttaaaaacccaaacaaaactagtttcaaacttatgtcaagccagaaggaatctttgcaaattttgtttgtagaagagtgaacttacaaatagatttcacagtttcgactctgttttggtatttagaggtcttgcacagtgaagcctttttcctatatcctgttaacatatcaccctgaaagaaattgttagaaaaaggctgggtactgtgactcacacctgtaatcccatactttgggaggacaaagcaggaggatcccttgaggccaggaattcaagaccagtctgggcgtcatagcgagatccaccccatctcttaaaaaaaaagccagacctggtggtggcgcacacctgtaatcccagccactcaggaggctgatgcagaaggatcatttgagcccaggagttccagactgcagtgagctatgattgggccactgcactccagccattgtgacacagtgagatcatgtttcttaaaagaaaaggaaaaaattgttagaaaagtgccactgcaggagttaagtttgtagaagaagcagtagcttcctatcacttgcctaactctgatacacttttacaggtgtagaaatattggttcaaacagattgaataagttctcaggtacattgctagtagaacaggctgagatttagacctggatgttttaactcgaaaccctgtactctttccataaggcccctcctgggacaaattataatatatatgaaacagatgtgaatcaaaataaaacaatggaaaaataaatagtacttaggttttggagagtggcaactgtatctcatcaccatctataaggtccctttctgtgggaaaatgggttctgggttggaacaggatgtcaggatcagcaatgttccaatgcctctggaagcagagacttgttacgtgatagaagaaattctcaatccctactccatcaggctgctacagtttgaaaaatattacagcatatgacatagattaaatggaagaaagatctcttgagtttatgctataattaaggaacaatttgtgagggaggcaatattttccttgaaggatctgttagtgtgagaagcagagagatgagatgagaatccaaagtttctataaagaaagaggtttcagttataggggaaagtaagaatataggccgagagccgggacaactactcataataaaagctatagcatgtatacacctaatttaatcaacacctccctatcaatgcagatattgttacaatcttttatacatacataaggaaactgagacagacagtttgctccgggttttgtgtcagcttctgtgactcatcaaggcctgagttcaaaaccactgtcttgctctctgcctcatggtagcttggtttaagagtctgtcctaaccaaatagacaaatcagagaataagcagaaataaaattgaatgcaaaaggtgggttcttacttttaaggcattgaatggtagttaggttaataaagatgtaacttggtgtggggtagaaaacgatcaaatgatcatgagcaagatagtgacataattcttgaggaaagcacagattcaagaaagccaagttgcacggtcatctagatgtgaggctgtttctgcaatcacaatacccctgtgaaattggagtattgaccccattcgaagtgagcaaaatgaagtcttagtgagatgataggcgtagtccagggacacccagggagtatccaggagcttggggcacacagtcctgtcacacctgtgctcttgctctcctgggcaagtcagcctccccttctacacgtgcttggtgcatagtagacactcctcacagtcttttctacttatccctcatctctttgtctccatcctgtgccaggagctggagatacaaaaataaggaatgattttggtcttttaggagcccacaggacactgggagacaaacatataaacaaataaatgccctgtagaataaaggtgctaagaaaaaaaagaggaatactggcacagaagccctttcttcccttcttcctttctgctcagacctccttttctttccctctcctcctcccctccccactgtgtgttgtctccctcaactcccctgcacccccattcattcatactcttctgtgtgaggctctatcccctgaaacagttcttttcacactgccagaaagaatcgtcaaggcctgtgtgtacagtgtgcattattgttgatgcattttttttttacttttatttttacttccatggtatttaaaacatatccttatcttcagaataatgcagatcaagaagtggtaggtcaaatacaaatatgtatttaaattaataatattaatcagatattgaatctagaggtgattggattagaagcatagtttttgtgactctgatttttttaatgctgaatacacagagacttcttttgaaaatttggtgggtttaaatgaaaacataacttggaacattttttcagaactgtggtttaagctggagcccagatactacaaaatgctgatgtttagtacttggtaaatattacttcacaagtataaatatgcaatacctaaattaggttaattctgaaatcattaaattttgttactttaaaaagtcgtgggaaacatttatattctaaaaacacttttgtctttggctgcttgatacggattttctgaaccatgtaatactgataatatgcaagaaaagacccgtatgataagactaacattgttcatagatatggagtcctttctggggggttttaggtgatggggaaaaccagggctagaaaagaaataatgtgtaagtttccaagatgaggactgtgttttatttctctgtggtgccccacaatttagagccaagtgcttagtgtttgttgaactcataagtcatttagggttttgtgtgtgtgtgtgtgtgtgaatgtgctttattttagcaaaatttagatgttgtcctattatataataacataataagtgggtatctgagtaatgtttaaattcgttttttaaatttcgtgaatttttagtaataacattataaaataagtatagttttttttttgtttttttttttttgcaaaaaataattatatcggccaggcgcggtggctcatgcctgtaatcccagcactttgggaagccgaggcgggtggatcatgaggtcaggagttcaagaccagcctgaccaaaatagtgaaaccccatctctactaaaaatactaaaaattagccgcgtgtggtggtgggcgcctgtaatcccagcctctcgggaggctgaggcagaagaatcacttgaacccaggaggcagaggttgcagtgagccgaaatcgcaccattgcactccagcccgggcgacagtgcaagattccgtctcaaaaataataataataattaaaaaaaattatatcctagctaatgtactaagatatttctcttctaattgacatcatgaagaaacattctataagtagaataatgtagagaggttcattgtttaatacatttttagtctcatcaccagtaaagaacaaaatgattctctaggccacatcatgctaactcagtaattcattttatgtctctgaagtttaaggcatggcatacttacttatttcattgtaatttttttttaaaaaaaccattttgaatagtaaccaaatattgaaaaaaactaatactgcttcaggcagatgaatttgtgaatgactgtaacaattaggcaattcaaattcatagatacatgatgattcttagagtaggtgtttaaaatgttcgcaaatacattcaatggcagttttagcctgtgcattttatatcaaagggaaattagtttattgagaaataataatataaaattattaactctttttcttttcattctacttcagaatgcctgttattaaaccagacatagccaactgggagctctcagtaaaattgcatgataaagttcataccgtagtagcatcaaacaatgggtcagtgttctcggtgagttttctttctttattttcttggtaatcttgatgttatctatgaatatttaaagccatttttaacctgttcagtgactctcgtcttttgaatttgtagtacctctatgtatttttcatcttctttaggaagctgaatggaaatggaaatttttgttctcttatgcttattaggaaatacatttctagatttagccacatcctaaactcactttctgatacttgattcatttttcttttatgctgtgagaagtaatacttttgcctttgttacagagaagagcattttgaattacagttccaaatgtatgatagtggtggtaggtaaccatccttttaaaacaaataatctgaagcctcacataacattatctttaaatctcatgctgcaagacactcttgaggctaaatttaccttgtggtgacactctttttgttttgaagaacttaaaccccttggatatagggtccaagatagaactgccacagttggaattctagtctatagtgaacaagattacagtaagatttcagtgtttatactgtagtatgagtgatatgtttaaaactgtgatccgagtgtgccagaaaaataccattaagagttgctgttttaagtcgtatgccttcgtgttttcagcctgaactcaaggaggttgctattaatatatagttagtataatgaatattctgtttatctacatttctcttcttacggctaaattgcattgaaatgtcattttgttttggggaaacaagtgaatttttatcagaatattgaaataggatatgaacatcaaaacaatataatttcacacaaataagacctggtgtggcttgagaggggtacggcagtttcttgatctcagtgagaaaatatcacaagttgaagattcatgagaattcattcattccacaaataattgttgcatgcctactgtgcaccagatcagttccaagctgttgccctggagaagctgacattcttgtgtggtgtcagactcacagatcaatgatgtcagtccatgaactaagggtagtctccttggttttctttaaatgttgtgattcactgtatacgccaaaattgctgaaacgttagatactgaaagatacttcactcagctctcttaaaatgaaagctatgatggagttaaacagctgtctcatgagatcttgtgtgactctctacattccacctattgacatggtcatttcagaaaaacagctttgtaagtgcacatttaaccagagatcaggttgagtagcaaattataggaattgaatagtaaagagtatcaatattacaatgtagcatttttttttctgggggaagattaactttacaaaaatgtagagtttagcataattttcagttctatattgagtcaccactgaagccttactgtaatctgatattctgatacaatgttcttttaagtagtgccttaccttaataaagaaaactgtctagattacttttcagagctgttacttctttttttttttttttttttttttttgagacagagtcttgctctgtcgcccagaggctggagtgcagtggcatgatctcggctcactgcagcctcttcctcccaggttcaagtgatttctcctgcctcagcctcccgagtagctgggactacaggtgcatgccaccacacccaactaatttttgtatttttagtagagatggggtttcaccatgttggccaggctggtctcgaacacctgagctcaagtgatcctcctgtctcagcctcccaaagtgctgggatcacaggcgagcgttgcttctttatgtttgttttagattccatgttgaaaagtagagacctctggcctgactgcatacgtggtatctttcaaatttttttctgtagaattatctccagcttcactttttagcttatgaggaaaacagggctgtttttaaaacacatcaaaattagtgcattaaaaacttccctggaaaatatccaccttagtatataatatcagaaatgatttcctatatttattggcttagctactgtcagagcatcaatagcccaatgaaaggcatgtgcacatgatagtgtagccctttttcctaggcatatttaaatttagctactttcatttgacatcagtattatgaaaggaggcaggttgaacagcgtggcgaagtaaaggctcattggtagaaatatttcaatagtatggcactattgtctgcttttagggtcatagacgggagaactgtgattgttaacttagtttcccagatcacccactgtcacatcaagaaaaaaattagcctacaggtgacaagccaggtctgggttaatgactctggagatagtgcaggcaaaggctttactgagcacacagtaaagctttaggtgccctacatttccagagttcttctgtttaatttttaggagtttaaattataagatatttctaataaggaaagtacagcagatgttgcagattttccatacaggtctcctatttaaaaagaaaaatatatagattaaactaagtcctttctttacatcatcctgttccactttctcccaagtggtggcagctaacctgatgatgctgtgtgtcctttctgtatgtgttgttaagacttttggtacagatgtatacaccacaataatggtaaaaaggaaagttgcaacaatatacatacttaatggcaccatttatgtaaattttaggcaaagcaatttcatttacaatagaatgaaaaggactaaaatacttaggaatatatttgaccaaggaggcgaaaggcttacacactgaaaactataaaatgttgctgaaagagcttaaaaaagacacaaatatatggaagggtatcttgtgtcagggactagaagacttaatatggttaaaatatcagtacctctcagctacttggaaggctgagacagtaggttcacttgagcccaggagtttgtgcccagcctgggcaacacagcaagactccatctctggtgaacaaaagaaaaatgaaagaaggaaatgtcagtactacctgaagtgatctacagatacaacgccatccctatcagaacccccaaatacattttgttgcagatatagacaaatttattctgaaattcatgcaatttcaagggggtcccaaatagtcaaaacaatcctgaaatagaagaagaaagttgaaagccttatacctcctcatctcaaaacttattacaaaaccacagttttcaaaacagtgtggtactgcacatatatagaccaatggactaggatagagagcccataagtaaacccttgtatgtatggtcaaatggcttttgacaagagtttctaaaatattcagtggagaaaagacagccttttcaacatgaataaatttgggtccttttcttactctgtatacaaaactaaccaaaatggatcaaagacctaaatgtaagagctaatgctataaaattcttagaagaaaacacaggggaaggctgcgcacagtggctcatgcctgtaatctcagcactttgggaggccaaggcaggtggatcacttgagctcaggagttcaagagcagcctgggcaacatggtgaaaccccatctctactaaaaatacaaacattagctgggcttggtggtgcatggcacacacctgtaatcccagctactcaggatgctgaggcaggagaagctcttcaactcagtgggcaaaggttgcagtaagctgagatcgtgccactgcactccattctaggtgacagagtgagaccctgtctcaaaaacaaaacaaaacaaaacaaaacaaaaaaaccagtagataacataggggaaaagcttcaaggtattggatttggcaatggtttcttagacatgacaccaaaagcacaggcacaaaagataaattggactatgtgagagttaaacacttctatatatgaaaggagaatattttcccagaattttcatccctcctttaaaattttccattctaaacactataaatatataaatgtttcatgcaaatattttctcccattctgtgggttgccttcttactctgtttttttcccaaagtaaccactctgtcagagtacaatcaacagagtgagaaggcaacccacagaacgggagaaaatatttacaaatcacatagatgataagagtttgtttgtttgtttgttttttgagacagtctcgctctgtcacccaggctaaagtgcagtggcacaatcttggctcactgtagcctctgcctcccaggttcaagtgattcttctgcctcagcctcccaagtagctgggattacaggtgcatgccaccacacttggctaatttttttttgtatttttagtagagatggtgtttcaccatgttggccaggctggtctcgaactcctgacttcaggtgatccacccacttcggcctcccaaagtgctgggattacgggtgtgagtcaccacgcccagccctcccgataagagtttaatatctggaatatataaagaaatttttcaactcaataacaaaaaacaattaaaaatgggcaaaggactttcatagacacctctccaaagaagatatacgcatggccaataagcacatgacaagatgctcaatatcactaatcattagagaaatccaaatcaaacctgcagtgagatactacctcccacccgttagaatggctagtatcaaataaacagaaaataagtaccggtgagggtgtggagaagctggaacccttgtgcacagttggtaggaatataaaatgatgtggttactttggaaaaaacagtatgatggtccctcaaaaacttaaaagtagaattacatagtaaccttagaaagttggtaattctgatatgtgctatataacacagatgaatcttgaggacattatgctaggttataagccaggcgcaaaaggacaaatactgtacgattccacttatatgaggtacctggagtagtcagactgatagagacagaaactagattggtggttgccaggggcagagaggaaggggaatgaggagttattgcttcaagaatacaaagtttcactttttaagatgaaaggttttctggaggtagatggtggtgatggtagcaggaaaatgcaaatgtatttaataccactgaactgtacatttaaaaatggttaagatggtaaattttatacgcgttttaccacaagtaaaacatacacaaaacaaatcagtatttataatgaaaaacttaaaaggagggttgtggccaggtgcagtggctcacacctgtaatcccagcactttgggatgctgaggtgggtggatcacctgaggtcaggagttcgagaccagcctggccaacatagtgaaaccccgtctctactaaaaatacaaaaattagccaagtgtggtagcacgcgcctgtaatcccagctacttgagaggctgaggcaggagaatcacttgaacacaggagatggaggttgcagtgagctgagatcacgccactgcactctagcctgggtgacagagtgagactctctctcaaaaataaataaataaataaataaaataaaaaaggaggtatgaaaattctgggaaatgaatgcatggtaaaaatgaaagttaagtgaagtgttaatcgtaggagaagtgaagtattttatgtattttaggtctttattctgatttctgaatacagctgtctgaatgaatgacagaattaattaatagtataaaacctgctagacacaaagtagaaatattattcagcttgtcatggtgataagccgaaaagtacccaataacaaactgatttttattataattattttcatgattcccttctggattcccaggatgttttccatttctgtcttgctcaatataacacaaaactggtcaaaatagtttttggccaggtacagtggtgcgcacctatagtccatccactcaggagaaaataagtttatgatgaattaaaatattaacacagttaatatcttaaagatggtgaaaaactaaattcatattgaatgtgattcacttgaaagaaagagttgaaagaagagtgtcagagtagtcctaatgtataagaaaattagttagaaatttggccttcctagcgatggaaaaaggagcactatacatgcactttttgaaaaattttgcctgatgtttcatgtttactactaataaactagaaagcaattgtatatgatcctgtatattgaattgttacagtgggccaatgatagaaaattttgtaaggacctaagggtttttcgtgtctctgtctccttcagttcggctctgatcttagttatttcttgtcttctgctaggttttgaatttgtttgctcttgcttctctagttcttttaattgtgatgttagggtgtcgattttagatctttcctcctttctcctgtgggcatttagtgctataaatttccctttaaacactactttagctgtatcccagagattctggtacattgtgtctttgttctcattggtttcaaagaacttatttatttgtgccttaattttgttatttacccagtagtcattcaggagcaggttgttcagtttccatgtagttgtgcggtttcgaatgagtttcttaatcctgagttctaatttgattgcattgtggtctgagagactgtttgttacgatttccattcttttgcatttgctgaggagtgttttacttccaattaggtggtcaatttttgaataagttccatgtggtgctgagaagaatgtatattctgttgatttggggtgtagagttctgtagatgtctgttaggtctgcttggtccagagttgagttcaagtcctgaatatccttgttaattttctgtctcattgatctaatattgacagtggggttgttaaaatctcccactattattgtatgggagtctaagtctctttttaggtctctaagaacttgctttatgaatctgtgtgctcctgtattgggttcatatatatttaggatagttagcccttcttgttgcattgatccctttactaccaggcctgccttacaagagctcctgaaggaagcactaaatatggaaaggaaaaaccagtaccagccactgcaaaaacataccaaattgtaaagtccatcaacactatgaagaaactgcatcaactaatgggcaaaataaccagctagcattataatgacaggatcaaattcacacataacaatattaaccttaaatgtaaacgggctaaatgccccaattaaaagacacagactggcaaattggatagagtgaagagccaacagtgtgctgtattcaggagacccatctcacatgcaaagacacacataggctaaaaataaagggatggaggaagatgcactggtttttcctcatctttatggatttatctaccttttgtctttgatgttggtgaccttcggatggggtttttgtgtggacctcctttttattgatgttgatgctgatgctgttcctttctgtttgttagttttccttctaacagtcaggcccctctgctgtaggtctgctggagtttgctggaggtccactccagatcctgtttgactgggtatcactagcagaggctgcagaacagcaaagattgctgcctgttccttcctctgaaagcttcgtcccagaggggcacctgccagatgccagctggagctctcctgtgtgatgtgtctgtcaatccctgcgggggggtgtctcccagtcaggaggcattggggtaagggacccacttgaggaggcagtctgtccgttaacagagctggagtgctgtgctaggagatctgctgctctcttcagagccagcaggcaggaacgcttaagtctgctgaagctgcgcccacagctgccccttcccccaggtactctgtcccagggagataggagttttatctagaagcccctgagtggggctgctgcctttctttcagagatgccttgcctagagaggaggaatctagagagacagtctggcgacagcggctttaccaagctgccatggctttgtttattctctgaggggaaaaccacctactcaagcctcaataatggtggatgaccctccctgccaggttgacttcagactgctgtgctggcagtgagaatttcaagccagtggatcttagcttgctgggctccgtggggctgggatccgctgagcaagaccacttggctccttggcttcagccccgtttccaggggagtgaatggttctgtttcgctggtgttccaggcaccactggggtatgaaaaaaaactcctgcagctagcttggtgtctgcccaaacagccgcccagttttgtgcttgaaacccagggccctggtggtgtaggcttccaagggaatcttctggtctgcggggttgtgaagaccgtgggaaacgcttagtatctgggctgaatagcactgcccctccctcatggcacagtccttcacggcttcccttggctaggggagggagttccctgaccccttgtgctgcccgggtgaggcaatgccccaccatgctttagcttgccctttgtgggctgcacccactgtctaaccagtcccagtgagatgagccgggtacctcagttggaaatgcagaaatcacccaccttctgtgctgatctcgcggggagctacagaccggagctgttcctgtttggccatcttgccagccacttgagaaaaatgtctttttactgtttttgacttaaagctgttttatgtgataacagtatagctactcctgcttatttttggtttccatttggatggaacaattttttccatccctttactttcagactatttgtgtctttaagggtgaagtgtgtttcttgcaggcagcatatatttgggtcatatgtttattcagtcagccagcctccatctttttattttattttattttatttttttgagacagagtctcgctctgtcacccaggctggagtgcagtggcgtgatctaagctcactgcaagctctacctcccaggttcacgccattctcctgcctcagcctctcgagtagctgggactacaggcgcctgccaccacgcccggctaattttttatatttttagtagagacagggtttcaccgtgttagccaggatggtctcgatctcctgaccttgtgatccacccgcctcagcctcccaaagtgttgggattacaggggtgagccactgcacctggccaccagcttccatcttttaagtggagcatttaatccatttacattcagggttattattgatatatgaggttttgttcctgtcatatcattaattgctttctgtttgttttatatgttccttgttccttcctattttatattgtttatctttgtggttggtgttttccttcagtggcaacattagagtcttttctgttcctcatttgtgtgtttgccttaccagtaggttttatacttgcacgtgttttcatgatggtgtatattgtccttttgcttccaggtttaggactcccttgaacatttcttatagggcggatatggtggtaatgcattccactggtcaaattcggcgtttgcttgtctgggaaagactttatttctccttcattaatgaaggatattattactgggtatagtaccactgagtggcagtgtttttctttcagccctttgaaaatacgattccattctctcctggtatgtgtggtttctgctaagatgtcgactgttagtctgatgggacttcctttatagatgactagatacttttctcttacagtttttaaaactctgtatttggctttagatagtttgactataatgtatcatggaagagatactgttttgcattgaatctggttgaggatttctggaccttctgtatctggatgtctgtatctctcactagacttggggagttttcagttattatgtccttaaatagagtttcaaatcctttcattatttctttgccttttgggatactgataatcttgatttttggttactttattgtgtcccatatatcatgaaagctttctttatgttttaaaattactgaaaaatttttttgtgtgactgcattatttcaaaagacttctcttcatgctttgagattctttcttctgcttgatctagtctgttgaagcttttgaatgcattttgcatttcattcagtgaattcttcattccagaatgtgtctgattcttttttatgatacccatctttttggtaaatttctcatttatatccttaattgtctttctgatttttttgtgttgtttttcagatcactcttgtgtctcactattattagtatcaaaatttttagttatttttctggaatgtgaatttcttttggatgggatctgttgctgcagacttattgtattcctttggaggtatcatattcccttgctttttcatgtttcctgtgtccttacgttgatatttgaacatgtagggtaatattcgcttcttccaattttagaatttgttttcataggggaagactttttcctgaagatgtatccatgctgttggttgggtaggaccctttggctttgattctgggtgcatgtggtagtcactgtatagtgtagtcactgtatgatttctttggctgtaaacagtatcggtggtatctgtgatttctttagtggcttagggtactgttattagtagaggctgtaatgaggttttctggggacaaggatgccacatgggccactctttgggcctaatggtggtagtggtgggctgagtatgtctgtccttgggccccggggttgcatgtgctgacactgatgttagtgggtccaggtgagtaaatttaacaaaagaagtataaaacttgtattgtgaaacaaaccattgaaaaaagaaattaaggaaaatccaaataaatggaaagtttctaatatttgtgaattgaaaaacttaagatggcactgcttgcctgtattagtctgttctcacgctgctaatgaagacatatccaagactgggtagtttataaatgaaacagctttaatgaactcacagttccatatggctggggaggcctcataatcatggcagaagatgaaggaagagcagagggacatcttacatgcagcaggcaggagagcgctcttgcaggggaactcccctttataaaaccatcagacctcctgagacttattcactatcacaggaaccacacggggaagacccacccccgtgattcaatttcctcccactgggtccttcccacacatgtgggaattatgggagctacaattcaagatgcaatttgggtggggacacacccaaatcatgtaattcccaaattagtctaaagatgcaacacaattcctgccgaagtccaagctgtatttttatcagaaattgacaagctgatcctaaaatttggaaaatatggaaacttaagggacccagaatagccaaagtaatctaaacacacacacacacacacacagacacacacgaaaaaacaaaaaaacacgccagtcacattggctcagacctgtaatcccagcactttgggaggccaaggcaggaggatgacttgagcccaagagttcgagaccagcctgagaaatatagtgaggcccccatctctacaaaaaagttttttttagctgatggtggtagcatgtgcctctagtcccagctacctagaaggctggggttggaggatagcttaagcccaggaggtggaggttgcagtgagctctgatcacaccactgcactccagcctgggatacagagcaaaactctgtctcaaaaccaaccaaacaaacaaacccacaaaaatccagaattggataaatcatatttccatctttcagaagttactacaaacagccttgtaatcaaatacagtgtagtacttgcaaaatgattgtcatataaatcaacagaatagaattgagaatccagaaataagcccaaaaatatatggtcaattgatctttgacaaaggtgccaaaataattcaatggtaaaaagaataatctcttcaacaaatggtgtcgaaacacctgggttcacatgtaaaggaatgaagtagaaaccctacctcatattgattagtatacaaaaattaatccaaaatggattgaagacctaaatataagaggcaaaacatctttaaaaatagatgaattgttcaacatcaagattaaaatgtttgcttcaaaggacactaacaggaaattgaagacaaaccagagaatgggaaaaaatatttgcaaatgaaattttcagtaaagcacttgtgtttaaaatacataaagaacacttacaacttaacaataaaaaacagcccactctaaaaataggcaaaagatctgaatagacgtttctccaaagaatatatgcaattgccggtaagcacatatagagatgttctgcatcataaggcatggagggatccagatgcaaatcaaaaccacagtgagattgtcctttgtacccactacatagctctactttaaaaagtcaggtaataacaagtgttggtaggccaggtgcggtggctcacgcctgtaatcccagcactttgggaggctgaggcaggtggatcacgaggtcaggagatggagactgtcttggctaacacagtgaaaccccgtctctactaaaaatacaaaaacaaaattagctggggcatggtgatgggcgcctgtagtcccagctccttgggaggctgaggcaggagaatggcatgaacccgggaggtggagcttgcagtgagccgagatcgccacactgcactccagcctgggcgatagagcgagactccgtctcaaaaaaaaaaaaaaaaaagtgttggcaaagaggtggagaaattgaaaccttcaaatgctattggtgggaacgtaaaagggtgcagctgctttggaaaacaggatggcatttcctcaaatggttaaatatctgggttattcagaaccttggctctgttgtatcaggagtatttaatcttgaatatttatataagtatttatgtatttctttattactatggtgaatatatcttacctttcaaataatattgaagcaagttatttccctgacccctttgcgggaccgctttgccacggggtgcctcctttaatcagcctatagctctcaactccttgtgggagggagcacacgagcgaaggaggcgggaactgtagtgcaggagcactggaactgaccagccgttttggcgccagtgggatcaaactccactcatttgcacctgttgccttccacacctcgtaggagggagtgcacaggtgagtgggtgcaggaaccagagcaagtgcttttgggcgccagcaggagcgaactctgtgcaggccccatggcagcatccaggaggggtgcctgtgactcccaaagccccagagggcatgttacagtgctcttttagctctgctctccacaggcggcttaagtgttaacagctcagttggcctgctgctgccctccaccagcgagggcaaagggccagcgtaacaaccttttgtatccacacacatggctcctgaactcttgtctggtgtccaggaaaaatgaggtcacacgaactaattgaaggatggtaaatgcaggaatgattttattgccgatgaaagtggctctcagtgggaagagaggggagctgaaaaggggacagaggaggggtaggtgatcttcccctgaagtccggctggattttctccggttactccatcaagctgtccctctgaagtcaagtcccttctctccaacattcagctgcttctcctctctgctgattgagtctggggtctttataggcacaggatgaggtggggtggggccatgggtagtttaggaaaaggcaacatttgagctggaaaacagggagagaagttctcactttgggccacggtctcaggcttttcagcttgagggtggaacttcaccagggacccacacctgtctgcctagaatttctctgcctcctgtctctatcattgtatcaatatcaaacaatagttgttggcctacatgtcagtaatttaaagatgaattaaatggttatatatgataacatttatcagagacctttagaaacattcatattctttggtctactatttttacttctagaacatattccaagcaagcaatgaaaaatcgctaattcaacatataatattttgtcagggaaaaaataaattaaaggcagttgggcttggagatatccatgtaaacaatctgtacttataagggaaggcagagttggaagtaattaaaataatgtaataaatgcattaatagaggtgtcatcaaccagttaaatctatgagaaagaaagaaaggcactcaactgcttgggggaagggaaggatctgggggaagatgaaagaagttcctcttgggggagatgactgatgagtcacagcttagaacatattttttagtatatataagccagaacttgcctcaaaattattgtataaataaatgaggaaaaacattagaatgtggtagcatgggggagagcacctcagtcccccaagtagctgagactacaggggcatgctaccatgtctggctaatttttatattttttgtagtgacagggttttcgccatgttgcctaggctggtcttgaactcctgggttcaagccatctgcccaccttggcctctcaaagtgctgggattacaggcatgagccaccgtgcccagcctgtgatttcaagttttatccaagcaatattttttgagagcaatataagatttgagactgggtgcgtggctcacgcctgtaatcccagcacattgagaggctaaggcgggaggatcacttgagcccaggaggtctagaccagccctggcaacaaaaaaaattttatatgattagccggtcatggtgatacacgcctgtagcctcagctactcaggaggcccaagggggaagatgctttgagcctgggagattgaggctgcagtgagccatgattgcaccactgcactctagcctgggtgagagtgaaatcctggaccccgtgtcgaaaaaaaaaaataaagatttgagataggtaagcttttgtgtacaagagagtttgtgctacattttgttttctttataatgtttgttttggttgatgcaaaattgtttcatcttagatgcttgaggtggaaggagggaattgttttgtagtattcatataattgaaattaccaccctatatttttctcctcaaagaaagaatatggtgatgaactaagaatagaaaataataactacatatggatgcataataagaaataattatatacgcattgtttgacgttttccttctctgctataactcaccctttttcctttgttctaccaccatatgttttgttctggatttcttgactaagaaaacattccaccatagtttattttaatatttaaagagcactttgaaagtttgatttttttttttttttttgagacagagctcactctgttgcccaggcaggagtgcagaggcacaatcttggctcactgcaacttccacctcccaagttcaagttattctcatggctcagcttcccgagtagctgggattacaggcacgtgccaccacgcctggttaatttttgtagtttaagtagagacggggtttcaccctgttggccaggctgatctcgaactcctcacctcaggtgatctgcccgcttcagcctcccaaagttttgggattacaggcgtgaaccactgtgcctggccaaaaattcaattttaagtaaatctgtttaaatgtttttgtgtaacgttttcataaaaatgaaaaattcgatgaacttagaatatgccaagaatcttctgcacaaaataataactttgtgttctcaaatagtaatataaagaatctgtaatgtatcttcattaagaatttatacatgcattttacatcataatctcttttattctatgaatagagcataatactaaattatgaagttactggaatttttataggaacatgataagaatcatgtggttcttttaaagagttaattttggaacatcttttgttcaaaaaatagaacattattatatgtattcttttgcctctattgtcagtttttaggataggcttttaatcttgaacatgaaaaggacatcagtaaacaaggtgagttaactattacatttatgcctattataggcttttagtttaaaaattacctatggcttaaatacagagaaggcagacagaaaaagaacctttttttccctgagcattttaaagagaatactacagtaccattaggggtttataataaaggactataattctatttagaaaactgacttacagtacatgacaaatgatagaaaattgaggtaagttttttgaagtcatattttatatttattttttatttttcattaatttgtcttttgccagaattaaatgttatgatcattaaactacttctcttcttaggtaattttttcacttagtctttctacccctctacctttaaaaagtatactgaacaaagcagcaaaagatattctctttgaggaaaataccttattttctgtgaatagttttttaaaattaaaacataatgcataaacatagaaattcttttacattggcaagaactttttccttgataaaattatttttccatttgaaaaattattaggataataagtcaagataatgcttaaaaatgtaaaaattttctgcaaagaatgtaaaactgtcgtaagtgaagccaacaggtaagccaaaaaaccagagagaaaatttgcagttcattttagtcacaaaataagggatgcccttcatatatgcagaactcttacaaatcaatatgaaaatgaacaaaagccctggtaaaaaaatattcagagacagtttacagcaaaggacatgtggctcctgcacatatgataaaaagtgctaaaagccacacacacattcaagtgaaaatcatgatgagatacgattttccatgcacattttggcaaaaatgaaaaatgtgttaattccgttttgttttgattttatttatttattttttttgagaccaggtcttgctctgttgcccaggccggagtgcagtggcatgatcacggctgactgcaacgtcggcctcctaggctccagtgatcctcccacctcaggctcctgaatagctgaatagtcagcatgcccagctcctttttgtattttttatagagacagggtttcaccatgttgcccaggctggtctcgaactcctgggctgaaacaatccacctgccttggccttccaaagtgctgcaattataggcatgagccactgcacctggcctcttcctaagattgtagaaacgtaagctctcaaacgctggtgggagtataaatggatataacaacctccatggagagcaatttgacaaaatgaatttatactgtgtgttatgtccacctgtaggagatgtgcaagaatagtcatgttagtattatttcttagagcagaagactggaaagaactagcaaaaggtagtgaaaaggtagctcactccaaaagttttgcttagggttccagagttcatagtaatttcatttgtcctaaaacatcacaggactattttaaagaatactatgtttctccctgctattggtttaaggaagaatgtctaaaagtaacttactgtaccagtgtaacatggtatcaaactgcctgtcagactggaatagttaaataaatatgatacattcataacattgaaatactgtgcagcctttaaaaagttgagagtgtcttctatgtgctgctttctttttttttaagacggaatctcgctctgtagcccaggttggggtgctggggtgcagtggcgcgatctcagctcactgcaagctctgcctcccaggttcacaccattctcctgcctcagcctcctgagtagctgggactacagatgcctgccaccatgcctggctaattttttgtatttttagtacagacgtggtttcactgtgttagccaggatggtctccatctcctgacgtcgtgatccacccgcctcggcttcccaaggtgctgggattacaggcgtgagccaccgcgcccagccctgtgtgctgctttatcaagtgacagaggcaaacgacattcattggcataaaaaagaatgtgtgtgtttgtgcttgtgatatccacagaatatctttggaaggagccacaagaaactgggacccatggttgcctgtgagttggggagctggagggctgactccataacaagtgagaaggatacatctcttagatcatatctttttagtattttttgaattttgaaccctacatgtgtattacctattttttttaaaaaacatttcaaaattgtgcagtggaagggtctgtaagatggagcagtgttgaaataatggagccttaattacctttcaagaaacttctgcagtgacttggccatccggggaagcaatcagaaaagcagctggctcattaaatggagagtgctggtcccacaggtgtaagtacacaaaacgcaatcactgaaattctttggctagcacttccaactcggagacagttgctggagatcacttaataggctctggttacaggttgatctaatctgaattaagaaattggaaaaagcaaagaaagagcagtaacataggtcagagtaaggaagctgagtccgaacagttcctccacagcctcctgtttccccttctgtaggtgtatgaactacccagagagattactgtgaatgtagaatagttggagagatgtgtttcccaatagcaaaaggcagtgtaaaggtagttcactccaaaagttttgcttagggttccagagctcatagtaatttcactcgtcctaagacatcacaaggctattttagagaacagtatgtttttccttactcttggttcaagcaagaacatccaaaagtaacctgatgtaccaatgtgactccttatcccaagctaaagaatatcctttcaaggcaaattcatccaaatcagcttgacatctgatgggagggggttggataaacaaggttgtagagaaatcaagtctgaagagtaaccttgcacagcttgatctgtttactttttaaatgcaggtttgttcagtgggtatcgcactctacttttgaaacataggactaaattttcacaaaaatgtgaagatcctgcccgtgtactctggaaaattgcttgtctaattgggtgcacagctgcacctgtaccctcttgaatgactcagtcatggtgtgctcaagggccaagtaacttgttatggtgctaagtgaagaacaaaaatatataaaattcagttactttggcaatgaaaaacactgaatggtattggttgttatattacagttggcaaatactgtaattaagacttcaagtgatttttagtattagccctggattcactttctgaagaattttatttagaataaaactttcagcgttgataccagatagtcacctttagttcagttcagtttcataaatctttataaaatatttatagtagtcaaggagcctattacgggtgctagtcaggtttctgcaacaacaaaaagtaaattaaagttggctgggtacagtggctcacgcctataagcccaacagtttaagaggctgaggcaggaggatcgcttgagcctgggagttggagaccagcctgggcaacatagtgagaccctgtctctacaaaaaaaaattagccaggcatggtggcacatgtctgtggtcccagctactcagggggctaaggtgggaggatcaagtgagcctgggaggtcaaggctgcagtgagctgtgatcgtgccactgcactttagcctgggcaacagagtgagaccccatctcaaaacaaacaaacaaaaaatgtaaaactcacaaatttaaaaaagttttaagaccaggcgcaatggctcacgcctgtaatcccagcactttgggaggccgaggtgggcagatcacctgagatcaggagttggagaccaatctggccaacatggtgaaacccagtctctactaaagatgcaaaaattagccaggtgtggtggtggtcacctgtagtcccagctacttgggaggctgaggcggagaatcgtttgaacctgggaggtagaagttgcagtgagccaagattgcaacattggactccagcctgggtgacaagagtgaaactccgtcttaaaaaataaaaataattaaaaagttttaaaattcactttggtatgatattttgacccctcaaagttgtttataaatagaatgaacagtggagccatctgttaaaatgccttggctgagtgactcagctagtagatgaattttgacatatttatagcaccatgcattgatcattttagttgtaatataacagctgtttattgagtaccttttatgacataggtcctggagaaccagtggtaatcaaaagagatgatacatctgacttctcacagtgtcatctgttgagggggacaaggatgaaagctgtgtcagtgaaggaggaaaattgagtggtaacagggagggcaggtgctgtggtgagcatgtatgtagcggaggccccgaactgaacacggaggtggttaggggaggcttaggaaggaaatactggccaggctgagacctacacaggaggtttgggggagggtaggggaaggagtcagagtttgaaggcctacataaaaagtagatacagctataaagaacgagatcatgtcctttttagggacatggatggagctggaagtcattatccttaggaaactaatgcaggaacagaaaaccaaatgccgcatgttcacatttataagtgggagctaaataacaagaacacatggacacaagggaacaacacactggcgcctaccaaagggtggagggagaagatcaggaaaaataatggatactaggcttaatacctaggtgatgaaataatctgtacaagaaaccctcatgacacaagtgtacctatgtaacaaacctgcacatgtatccctgaatgtaaaatagaagttaaagaaaagaaaaacacacacacaccaaaaaaaagcagaaagagaactaagaaagttaattgtgtctgaagcaagagagaagttgtgtatgactgcagcacagaaagcttgaagtgtgggacctggtggcaggcagggagggggaaacgagtggtgagatgggaggggcaggccccaggggaagcagctgggacccggccatgtgaaagtgccagccctgaacctggtctggatgtgtgtggagtgcagtggagagccacagaaggcttgcctgcagggagtcggacagagttgcctgtttgggagatcactctgccttcatgatggagaataggtttggagaggcaagactggaggaagagggcctgctagaagcagtcatgcaggtgggcgctgtgagcctcagctgcaagtattttggagaaaaaatggatcaacatggaagagatttaagatgtagaattaaccgtgcatttattgagcagtaataatattagctaatatatattgcatatttaatatgtgtcaagcactgttctaagtgatccacatgcaatatgttatttaacaacaattgtagtcaacatgtacaatctactttcatttctattccaatcctataaagcataagtactattattagtcctatttttaagtataaggaaattgaagcatagagaggttacgtctagagaaataggaagacaattttagacataattttgaagggatctgtgagatacacaagtggagatgtttcctgggtcattgcatgtgaggttctgtggcccaggagagagtttgggggagattcggtctccagtagtataaatggcagttgaacacgggttgaattgaggagaaagtagaaaagggaagaggaccaagaaagatgaaaccttgaggtatgctaaagatttaaaggatgggcagaggaagaagaatcagcaaaggatactgaagaggagcattgaaagagactgtgtcagaaaacccaagaagttgtgttgtttcagaatttaaaggaagaggctgttttaagaagatgaggtcattgatgccagtgaatgtaagaagtcatgttaaaacaaaaaaaacaactaaggctgagatttatccattggatttagtgaaaataattgagaacaatttcagtgttgtaatggggccagaaatgaaattgtggtgagttcagacattgagatatgcggacaagtggagtgaatgactcttctaaaggcatggtcgttaagagtgggccatggtgttgaggggattgactttttaaaggtttaataaattcttaagtgctgataacaggtgccagaagaagggaatttttgatgattaaagaataaggagaaaaagaagaactaggagaagggcctctgtgcttttttttttttgaaatggagtcttgctctgtcacccaggctggagtgcagtggcacgatcttggctcactgcaacctccacctcccgagttcaagtgaatctcctgcctcagcctcccaagtagctgggactacaggcgcacgccaccacgcccagctaatttttgtatttttagtagagacggagtttcaccatgttggccaggatagtcttgatttcttgaccttatgaaccaccacacccagcctctgttccatttttatatgaaaggacaaaggagcgggtggagatgaagggagagttggtgacttattcacctgtgatggctgctgtgggggaagaggtgaggtgagactgggaggagttgattatggcattagaaattggaagtacgtggaatgttgttgaggctgggagcaagaattgacttaaacacaacagaagggctaggctaaccaagcttccatttgaagtcgtggagcaggagttgatggggtatcaatccatgtggtcagatagtgcaaggcagctctgcatgtccaggaggccaggacacagggaggctaggcggagaggtgccagtgagggaggtggagataggcagatcctgaagggcctttaaactatgggtttcgattttattgtgacattattcattatctagccagcttttataggagcagtttataaagtatgttctagggaatactattgatcaacacgtttttcaaaagtctaaattgtgttcaaattggtgtcttgtgagaattaatagaatacatatttagatcactttcataaataaatacattaacatcatattttcagtaagctcatatttgatatctaatcaaattcttttagtcatgaatttgaatgagaggttttttgggttattgttactgtttgttttgtcttctgtgtttttatatttggaagcagaattagcttttggtctcttaagtgaccccttagtcacttaagatggtgttcatttccatcattgtgcttatcatgcacttgagttctcgtgtttatttctttgtccacttgtttaatttcagcctcttcacactaaaataggagctttgtaaaggcaaggacctagtcttgttcactgtcacacttcttgtacttctcaggaaatattcattgggggcagggtagaggagttggggaaggaaggaaggaaggaagagagagaacagtgaagcgggaaggaaggagttccaaaaactgcttccctagtggtcatggaaactctttaataaattagaatgttgtctccaaaaaatacaggcagatatgcgttgacaattgcctttcatacaccttaacaaactagttacataatgggatatcaaaattcagtcaatgtgtttgctagtttaatttgttgtgattaaagaaaacaatgattttatttataaatttagcacctaggaaatgtgatttcaaatatcaaagcataggcattttttactctttttaaaattgaagggtcaacaaaatctgccttattcttcacagttttttctctgtcagtaatgtagcagtgtgttaatttccagaaatttaatctcttctataaaatttcctgtgacctgaaaacttttgaattggagttaatttaccaaactgtcatggaatgcctgaaatttccttggggcagaggaggtagcagagaggtggtaagttaccatgtttccattgtgtgaataactgataagtgggattccaaacagaatccatgtagcgttttaatgaattcacatttggagaaaaaagtcacagactttcaaaacttacaggaatttggctgtcctagggcaactcctcacttaacagcaagaggggatgagaaggttgagtgactcacccagggaagtgactcacccagggaaggtcaagtgactcacccaaggttacttggtaagtaaagagagaagccagaagcctggggcctcctgacggctcctgcttctctttttactaaggtcttctgccatgggaagaaactctgaatgttagcaaccatctggatggtgttagttgtatgtctctctatgtatgttgaaaagaaaatgttgaagaattgaatttctcctgcttatgggttgtgtcacatttaatagcgttctttaagaaaaaaacacgattgctcaatatgattatatgagctcaccataaccaatgacaggcagaaaatcctgggaggatagacactaacaccacattatcctgttgggataatatcccaaattctgaatataactttcttttaccactttaaaggccaaaaaatggctgttaaatggagtatttttgtcaaaccaagtttttaaagttttcagcagctgcttctgctggcttttattaactactgaagagtctttttttttttttttttttgagatggagtcacgctctgtcacccaggctggattgcaatggcgtgatctcagcccactgcaacctctgcctcccgggttcaagcgattctcctgcctcagcctccctagtagctgggtttacaggcgcccgccaccgtgcctggctaatttttgtatttttagaagagatgcggtttcaccatgttggtcaggctggtcttgaactcttgatctcatgatctgtacacctcgggctcccaaagtgttgggattacaggcatgagttaccggaccctgcctactcaagagtcttaattgaacatcaaaatcctggttttgtttataaggaaaaaaagttaatggtgcaactaggactaattctttgattaattttttaaccacttctacttagcaagtatatgaaacacattaaagactgatgcatctgttttgtttttgttttgagatcaggtagaagatctacaaaactagttggaggctggaaagaaatttcagatagtgatacatagaaatgttctgccttaactctgaatttttagtcatgaaatagtgcaaactcttaacattacttttgtggagctttgtagtccataaaaataacattgttgtagagcctctgtatgcgtcagctgtgactgagtgttttgatgtcttagcaaaaggcagaggagtgctttcctttgaaatgtgtgaggcggtttgagatgcagcttctcagatggatttaattagtccttcgtagaactggatgtccgtttgttgcaactgaattctcatttcattcatccataactagaaacacctcgcttcaaacgggtttcttcaaagaaagaggggtttagggttctatgttgtactgctttttgatgttggtttccctttaactgagaagaccttatgtttatacaactgttattattaagaaaacacagctttcttcagcgaggttccttttgcatcagcgctggttcttggtggcagtcagaggtctgtggaatggatctctgtcagactatcacagcagctgtgtgtttgcagattttgcttatgagaggcatgaactgaaaataggcgtaaacttgagtaattccctaaacccaaaatataagatagaaaccagtaactgaatctggtaacagggtagttgtttgtttcagaagcttatattaaccacaaaaacaaagtgaatcaactaacaagggttaccatgacccaaatagtaattgcattttgattcactttgcctacagtgcacaggtcaggtctgcttctcaataaatatgttgaaagaatgaaatatatccttcatagtaaaattatgttttttaaaaaatatgtcctactactaatattttttaaattatccctaaaccttcacatttcattagaatagctacttcaatttactctgaaaaaactgctttcttgtctttccagtttgtgtgtccagggtctgacgtgctccatcatcaaggcagcttttatcttctgtgtccgtgattctaattacatttcagggggttgtgatctctcccagaatcccgttcatgcattgtgtttaggatgaaatgcttgagggggtttggggctgtacactcatgggcacaggtttgcatatctaaaactttctttgctctaacatcctgatttgtataaaaatcctaaaagcaaatttcagacttctaattattctttgcctttaaggaaagacaaaattaatttagactgttcaagcttaaaattatcccaaagccacagatcacactgaaaacacatagtaatatagcccacaaattattttggtgtcttgtttccatattccatccaagagtctgtagaatctgtaggcttatatttctgtcttgtttcttagccataactgatcttttccatcttattcaccagactcagcactgcgtaactgtggcaatttctgaaactcagtggcaagggatataccaccattgaagagattaaaaataatcaacaaaggctttaaaaagtttaaaaaatgtatttggagcaataatagcaataggtcagaaaaagttttcacggaaagggccaatatacaattaggtttccatctctgtattcttgattgtgtgttttatgtcttgtgactatcttgtggagttcctaattttaaaagaattatgggtgtggctcaggaatattttattacatttgtgtaaattaaataattttttaaaattatggatgtgatttaaatattcttttagtggttctgcctttggtacagtgttccatgattttgtaatgtttttatttgttgaaaaagctctaaaaatcttggtagaaatatagaatctcagaaggcagaacatttggtaattatcttttatatcaatttgcaagacaacttgttagggagccctatttctagtagttgaagttaataagtaacaaatcacagcaatcacgttttttatcatgcagagtgggcagtcttataaaaaagaaacgtcagtctttttggatatagggacacaagcaatcatagttttcctctgttatctttagtttgtaaaaatcaacctatctaccatcagcatttacccacaaggtttagtttggagttacctaaggggatggtagagaaacaataatttaacgttatgctgaaaacaatagtctctgaagatagagaaacctctgtcacttaccagttgtgtaaagttggaaaagttacttagcctccctgaaccactgcagcagtggtgtttacctgaatgttggcatagaggaaaaccaagggtcacgaggcaggtggacttgagtttaaataccaatcctgaacctgctggctgtggaatccagcagaagttagttatcttttcttagccttagttttccttatctgtagaatagggatagtattctccagggtttttgtaaaaattaaatgagattttatataaaggctctagtacagtggctgatgtaataagcaccccagaaatgatttctcttccctctaaaacacggatattttgctttttaaaagaagctaaagtagcttttactttgcaagcagttcttttccattgtatgaaaaattcttggaaagttttaaaaataagacaaaagggagccacagtggcccaggcctgtggtcctggcacataagcagccgaggctaggcgttcgaggttagcctgggcaatatagaaacctcttatctatataataaaaataagacaaaaaataaaatgtgccaacatatattagcaaggtttgtcagtactgattaatatttttacattctaatattctttgttagaattgtatttattttatgaagccccttttgaatctacagcagactacctgggaagtagttatagaggtcatcatcgtgtcttggtgattcactttgggaaattttgttgagtgaggctggtgaacctagaaagctgcttcttctgcctccccatttctgtccccaaggccctgctgtggttcaaaagcccatataaacctgcagtttccctttcttccacgatagggcgcgcacctacactgttagggtatggggccgactggctcctgccctgtgggaggtttgatccttgtccatttagaggcccttccttattcatggacactctactgagtgtctgttgcaaactccctggtataaaccccagacgtcatggatttaccacactaattattagagtggccattatttgcaataaaatagtgacccttgccactgtgttttcctaccaaataaacttactgacaagtatctgcattggctgggtcgaggtgtcatcaaatcagcctaggtttggatgtgctgttttgctagctgtagacccttgagcaattatgtaacttctctgagtgtcagatttgtcatctataaaatgtggttagtaacgtctccattgtaggatcgttcctaggattctgtgagtgtgatgtatattaaaatacctgattgatattagggcctcagtcatgttcctttctttgctttagactcatttctctgaaaaagtaatacgatgtttatagttggggaaaaaaacccaaagagcgttcataatctggatattaccactattgaaatttctattttgattcagtgttttttttgaaggtattcttatttttaagagagggaattataaaatatgccattttctaactcagtgtttaaaccttaaaaaaagagacatttcttgaaatgttaaacctatggctttgagcatggctgtgtgtggctgtatttgctcttggccatatttattgtggcagcgtggtaatgggtttatgcttgttttatcgcttgtggtttttataaaataaaaactgtgtttggctgtgtgactgtcgttcagaacaagattaaggaaactagatggagattaaacatagcacaatcttctgttgtaaataaccatagacaaacttgtgagcagctaccaaattccccagttggacaaaaagtgcttctttttagctttgaaaacctagtgatgatgatttgagaactggcataagtctctttaatcattcaggttcagcgtgattagaagaagagttgttttaaatgtttttgtgattagatttgaaacaaagcttagaaggatttatgattttgtttacaaccagctacgaaaaacaccaaggaaatgtgaaagctggtagtaattggtgagcttgctgggagtggatgttgtttccagtagtgtaacttaacaaagattgaaggaagctccgtgccattttatttcataccactggtttaggtgcattaattgatattttaaccaaaattttaatctaaatcaagtcttttaggttcaacctattccactgggttttaaatgatcatatatgcataccacagcacatctcacattgagaacgttacctcagtgggaaggttgtttcattcttggttgagtatagcattccagcttgtaattaagctgcaatacaaaaaatatacgcacttgctagaaggatattcttgctagcattctgtatgtatcatttgcttattcaagcatataaaacttcaacaagaggaggtaattttgcttagatctcttgatttgaattgttccgctatttggcactgggtggaaaagggaaaaaaatcatattgaaagcattgttctgttaatgaagttgcttgtccttttttgtgccaaatttggcaggtaaaattaccatttattctacttgctagagctggagaatagactgttgaggaaaagtagcaatttaagtaatgacactagatagaatgtgctacattatatacatctcccatacttttagatattgacatgcaatttttatttctctttagtaatgcactttgtctttaaccactacattacttcccgtaagctccatcaactacatgcaatttgcttcagttgtgaaatttaaaaatttactattaattataataaagtgaagcattttgattcaagaagaaattaaagattgctgtattttgttctggatatttcagaagtattgtattctttttaattctgaatatttaacataaaaaagatgaaatagacgcattggttaatttgaagaaatacaatcaaatttgaggtattcatggttttttccatgttaaatatgctttgcctatttatatttgccttaatttttgttttgtagagtataaaagagaaactttaaactcgtatacaaaaatgggaaaatatctaaaaatatgactaggtagttttaaaaattactcacgtattcaaatgaaatgcataagtttagcatttgctaaatttgagatattttatttcatattatttgtaaatatatttttgtttggcgtgaatttgtaattcactaagtttcttgtagattaaatttttcttagttgtaaaacttcaggcttaaaaaaagtattattattgttacaatttacactataatggctaaacttgcccctcctccttaaaagaaatataaactaatttgcaaaaatatattttttgaaaagccaattggtgaatttgtagacttgtaaatgttaattcaggaacagagttgagtattgctggaccttctaaccatcactcatttctttctgcccactaaactaactggtaggcaggtgcagatgttacaaaatctagcatcgcaattgacactaattggcatagttgttggcagtcttatcagaaagcaaagggctgaatggttgaatgggtttagagaacttgaatggtaataagcatttttatatgcatcttgaattacttttgtgacccagactaacaggaacactttattctgacctcattcttcaatgaatagaaattgtagaaagcataatatgcagtgtatgtgatgactgattgtttttcaggtaaccttttacagctatctgctctgttgcctacttcctccccccactacctcccttcccagtgctcagagaaaccaaagtactgtaaatgtgtggaataaaaaggagataacaatcattaatgaatattgaattaatttatttgagtggtttgttgccaaaagcttgaggatgtcataagagttaggctaaacttaagaaaaagtattcattgaatttatggatgaaacaaaaggacgactgggacttgcttcttaatagtcttggagcaggtgggtgaatcagtggggatatggataaaacaggattggctttgagtggataagttttgaacttgggtgatggatatatagaggtttattaaaccattctttctgtttctatatatgtttgcaattttccagaacagaaaggttgtttgtttagtatgcggggtgacttcaccctctgctgttgtcaggttttttcaatacctgccagttcctttccaggatctgccttttctcccccagttccttttatcaaaaagtacccatctaaagtgagaactacatcacctgacaagctgttctgtgcgcttatgtataaatgagttattttctaggcagtgtggattttaataggagttttctaaagacactgccttaattaaaggaatggctcttgggttgggaattatagtgttggggtgggtctttgtgtctatatgtgactatatgtagaccactcttcacacttacagaagtgttaggtgataattttaggtgtaatatgatgattgatcttagttctttttagttctttttttttttttttttgagagttttgctcttttgcccagtctggagtgaagtggcgtgatctcagctcactgcaacctccacccactgggttcaagcgattcttctgcctcagccccctgagtagctgggattgtaggtgcccgccaccatgcttggctaatttgtgtatttttagtagagacggggtttcaccatgttggccaggatggtttcgaactcctgatctcaggtgatccacctaccttggactcccaaagtgttaggattacaggcgtgagccaccggcatggcctcatcttagttctctatgttagaggtaatgatgtctttttcttctgtagaaagactttccaaaaagaaagtgcttttctttaggactttttagaatatgttcaaaatactgatctttgactaaggagaggaagagaaaccaagatcatatttcagactattgtttcttttcccatggttttggcttatcccgagaattgacttgacgtgttcccttttttatttcaaagtagcattgcttgaaatattttagattttttatagctttctaaggaattaaactctaaaaacactttaactgtttttttgttgttgttgcttgtttgtttgtttgttttgatacagagtctcactctgttgcccaggctagagtgaagtggcgtgatcttgactcaccacaacctctgcctcctgggttcaagcgattctcctgcttcagcctcccgagtagctgggactacaggcgtgcaccaccatgcctggctaatttttgtatttttagtagagatggggtttcactatgttggtcaggctgctttcgaactcgtgaccttgtgatccacccaccttggcctcccaaagtgctggaattacaggcgtgagccaccgtgcccagccaactgtttttttgtgttttttttatttttttttaattgtatcttgggaggccttcatgagtgaatgtagcttgctcattattttttgtaccattcccagtcattttctactcattcctttccttactagttttcagtttggccatgttctgtgtacaatttctggtaagtgctaccaaaaccaatatatattagacatgctgtttttcaagactcctgaaaaagtgccaatcttattctcctttcagtttgggagcacagtttcacaaataatagaatagtcttactttgtttgcagaattagaaggatttatctaacaacttgaatagataattttttttttgtagacgtgaaagtgaaaccttagtattgggatagaattttaagtagcattttaaatttgtttcaaaatcttttcttattgcctgcctttcattaaatgagctatggtaagtatgctggggtgtatacgtgtgcgtggtgatgagatgtttacctctgtgtggatcccttgtagattttgtattgtaaaagtgcataatagagtcctttatatagctggaataactgtaatctgctattgtaagcatatatggatttttaaatacaaccattataatactttataggacattacaactgaaaatattttgacttaaaagttgctttattagtcttacaaaagctatgttgaagagttttttgttttttgttttttgttttttttttaaagaaccatgttgtcagtggtcaacaatcaaatgtaaaaaacacttagctggaaaacatccattaagataatgaaagtgagccacgatgcttgtgtcagtttttatattttagtttaaaacatagttttttagcaatcctataattataaatataagttagattttctctctaatttaattagataatttttattttaatacaatagatacttatcaaggatctgtcgttcttcaagatcagggcactgtgctgagttcttcatgagggccatgaaggaataatgcccaccctcacgaacttccagcctagtttggaggtgttgagattaatacagtaatgattgtaatataaggcttactctgataagtacattgagatataaagtgttacagagattcagagcaaggaaagacccagccctatttagcagtgggcaaggggtggtatgggtgggtggtattggtaggggcaggggggatgaggcagaaaatcaagagcaaactgaacaaaatgaatagaataggtgtcaggtcatggaagatggatggtagaattctgttaggctgaattggctagtccaaatttaaaaaatagtaggactaaagtttaggatatagtgcctgtgcacatttgctgaatgtaagagaaagtgggaagaaaaattgaaatgatagttagattgtgaccattagtacagaagacccagaggaccatgtggagaacttaattttttttttttttttaattaagcaaccagaagccaagaaggattttgaactgagaaaacttgtaagacacagtaaagccacatttgtaactggtctatcgaagtgaatacaactgtagcaggttggagatggggctttgggaaggttttcttgtttgatgggattgtcagtagtaaaagaaatgggaaggaaaagagttcacattcagcttagaagttgagaacaaaatttggggagatagatgagagagatgtcaggtaatagttgggggttgggaagggccaaacaaacaacactcagttattggcatgtgtgttaggccgtttctcacactgctgtaaagacatacctgagactgagtaatttataagaaaagaggttttagttggcacatggttctgcaggctgtgtaggaagcatagcagcatctgcttctggggaggtctcagggagcttccaatcacggtggaaggccaaagaggagcaggtgcatcacatggtgagaaccacagtgagcgggggtggggatgtgccacacacttttaaatgaccagatttcactaaggagatggcccaagtcattcatgaggaatccacccccattgttgcaggactttttcttggtttagctaaggatggggttctttgtcccatggccatgaaaattcaggcccacagacaatttgaatggtgagtaagacagggttttattgggtgaaaaggaaaaaaaacgggggaacagggactcttcaaggccagagtcctgctacagtgcttcctgcctgcagcttgaatgtttggttccacacaggaagaggaggggccaggttcctccctgctgcaaacactgcgaacttcctgaggccccaccccagtgcgcagctggttggaatttttccaagaaccccctccctcccacctggctgtctcattctcccctctaaagaagtacatctaactgccattagaatacggataaggacaaagaccgatcttaactgcttcctgctgacaggggatgctgttttggggaaacagcagtcagagatccctcaaaggcctatctaagcgttcccggcagaaggggccgttgtcagagtctccagttgcatgaccatttggagtttgatggcctgaaggcaagaacagacaaaccgggttgttagaaaacatgtatcaaaaggaaaccagaggacgggtaaagatagctaaaaaattaggccttttaccagtttgcacagggagaaggaggccaaaagcccgactggtcaggaaaacttcacacttttgctggcatgttgggcttctgggttcccttcccctgagcccagtcctaagccaacccgtttaaggtttgggaaattaactctttccagcttggaggatgcatctgaggtgagtgtatcatagtatagagacacaattacctatttgcaaagagagaactgaggaggagaaagaagaaaagaaggcgttttttttcaaaggagtcctgggggtcccggatgcattcaaaaggcgtacaaactgaagatgaatggctacctatctagaaagaggggagcaggtgtccctggttcccttctcttcctagcagatactcagggttagtgagggagagaagagagagcatcctctttcctttcttctatccttgcatccctgaatcccagcaaccttggtaggtgctgccatggctgtcaaatcaacttgcaccggtgaagcagggggcctagggggtgagaatcatccactcttacccacgtaacgccctatctcccctgctgtcagtagctttgaattctgtatgccatggatactaatgtggcctttatccatgaaacaggaagccttggggttggcttaatcagcaggaatcagccactctcacctgtgctgtgccttttaaccttggtgttgtcatctgcctctggatcccttacatccagttttctttctagggctttgacccgaagcttggaattgagtcgggaacacaaatgtgtctcgaggggagttgtgtggactccttaccataagtggaatactaaggtgaaactgtggaactgagtcctcctccaacaagggagaggaaagcatgtcttgtgacacacccagataactggtgactgtagttatgcttgctaggatttgggtgcatggtgcttggctttggttcactcccttggtcttactttacccaaaggaaacctcggagtgatgggcatcctatttattcccatcccctggcaggatttacaggataattgctcagaactagaatattgatccagacttttacattacccatccctcttgttctttctgagctgcagccagagattgctggttggtttacaggaacaagcagggttagtctaaaatgtaggtgaaaacttaaaaacaactagtgagtttagaatttaatgacaaatgtatgataagttttggaacataatttctctccagtcctcatttttgttaaacaaaaaaaaattatgataggactgagtggtttgcaaagtagactttagtcttattctttgcctgaatatttgcataaaatgcaacaagaataattatttctacataggccttttggattggctttgatggatgtctattccacaaggaatctcagataagaccttttaagccgagcccagccatggctttctatcctcaaatacttgcgagttgggtggtcctctccttttaaggtcccaagctaaacttggagctcctggacctgttaggaagtgacattcttttttttttttttttttttgagatggagtcttgctctgttgccaggcaggagtgcagtaaatctcggcttactgcaacctccaactcctgggttcaagtgattctcctgcctcagcctcccgagtagctggaattaaaggtgtgcgccaccatgcccagctaatttttgtacttttagtagagacaagatttcaccatgttggccaggatggtctcgatctcttgacctcgtgatccacccgcctcggcctcccaaagtgctgggattacaggcatgagccactgcgccccaccagaaagtgacattacttactgaccacaggtcagtaaccctttacagggactgcgtagacaggggtatgaggccattttccccactgggctcttactggctctgcaagtcaagattcactcctttcacagtgaaagccttggtaaaataaccactttctccaattgtgtcctgttgcaaaagaaaaatggattcttactacactgatgcaaacaactattttgtcataagttaagaacactcacagatagtttccaaattctagaggaagcaggaagagagaaacaaacatgctccaaaccttcatcacagtagtgtataccttacttaattattaaagtccgtaaacagttcaaaattggccgggtgcggccgctcacgcctgtaatcccagcactttgggaggccaaggtgggcagatcacctgaggtcaggagttcgagaccagcctgaccaacacggagaaaccccatctctactaaaaatacaaaattagctgggtgtggtggcacatgcctataatcccagctactcaggaggctgaggtaggagaatcgcttgaaccgggaaggtggaggttgcagtgagctgagatcatgccattgcactccagcctggctgggcaacaagagtgaaactgtctccccacccaaaaaaagagaaaaatagttcaaaataagtttccttgactctgaaaaactaaacaaggatcagcaatattccaagcaaaagtcaaaaaggttgcttcaggtttctgagttcactccattaagttctcttgttttgcttgatatttgtgaacacttcagctctttatgagtcttgtactttttcctttattttaatgttacaatcttcaaagttattagaagcctgtatttgagaggacctgttaaaattctatagcttattataaaccatcttttgaaaaggattaaaacaagacaacaattgctgtgaatagctaaatatccagggtagttacagttagaaacacaactgacaaagaagttcggttatctccatggtttacaataacttaacataacaaccttaattatgattaatagcatatacttggacattagaattttagaaatcccatacaatttgggaacacatattagcattattcacaaaaatataacctaaagaagattgaacatcattttggcaatcccatgtaaactaaacatgttaaataatcctgtttacctctctttctggacattccaggggccctctggactatccgaaaagccagttgtcaggaaagacaattttgaaactgaagtttgattttgagaaggccgttaaacgttcaaggtttaaatactttgtgttataaaatagaattccagattaccataaattatttattttgccaaagtaatgactcagaagttttaaataagtaaaaaccttttatagccctttacgaattttgccaaagagcagattagcgccttacaaaaaccttgttgtgtttttatttcaatgctcaatctacagaaaaaccatattataccttttggaatttagtcaatatgttcacatagagaacctcttctgcaagattcatttccacaattcttccaccacttgtttgaaccttcagctttttcctaatttaaaactgtcctttaacctagacaaaaatttatatttccatgcctccttgtaaccttttgctaaaaaacacattttactgttcttacataccttgcatgtaaatctatttccagtagtcttaattacatgttataatagtaactcctagcaatttttaacttttttaaaacttggggctgggcatggtggttcatgcctgtaattccagcactttgggaggctgaggtgggtggattacctgaggtcaggaggtcaagaccagcctgaccaacatggtgagaccctgtctctactaaaaatacaaaaaattatctgggcatggtggcgggcgcctgttatcccagctactgtggaggctgaggcaggagaatttcttgaacccaggaggcaaagcttgcagtgagctaagattgcacgactgcactccagcctgggtgacagagtgagactccgtcttaaacaaacaaacaaacttgataagttgttttaattgtttaattgtgtgctaagtgctgccaaggtttgccttcttaattaagagcatggttatatgtccccagcccttaccagttgtgaagccagcaagtcaaatagttcttaaaactcaaaaagcagcttgtaacctcaaaatacttagcaaactttgtatctgacctgcattgtttagtccacctatttacattttgacaacatctgctctttaccaataatccttaaggctgtttttgtttctcaatgattaaagtcacgtgaactgaaaggtatcacagtttttatcttccctttaaaaaatattagatccaagtgcttgtctttgtttaggccaaattaattagagctctttttacagataccacacacagtatatacacagacaggcaaaagaaaacccagtcactgggtggggccctttaagagacagggctaggaagacatgcagatatggaaccagagagggctcatcccctaaggcaggattgctaaacaaagccttgccactggagttagaagccatgccctcaggatgtaaaacaagatggaagcctgatttcacaaccaacaccttgcagagaatacaaacagtgatagttccggggtgggggtctggcctagtaaagtgttttctaaaagagaaaaaacttaaaagttaactgttgacagggtaaagtaggaaaaaaacaacaacaaaacaacagcaggttaaaaaatgcctaggaaagaaccttttattctcatgcaagtggttctttcaccgaggagagaagcttaagcttaattactgtccgatggagttgaaacccttggctggggaaggggaaggctccagtggctcgtggcagaaaatgccagccagccaccccgggtgcccttggaccatgtgtccaagcctcagcagtggaggagggaggtagggagctgctgctctctggtccctcccaaaaaaggaagaaaagggctatggaaaggtcgggttggttctcaacccctgggagcagcaggcggtgggggcacagtttcctccaccctcagaaatctcaggataaaaaggcttaggagccacagtgaaaggttttgagtccccatttcactcactgcttcttgagccccacattgggcgccaaaaatggttcctggacttttccttagttcggctaaagatgaggttctttgtcccatggccagaagaattcaggcttgcagtttgaatgggagtaaggcagggttttatagggtgaaaagggaaaaaaagggggaacagggactcagcgaggccagagttcctgctagagtgcttctcacccacagcttaaattcctacttccacataggaagaggaggggccaaacggtgcagatggtgaggacttcctgaggctccaccccagtgcacaggccagttggagtttttccaggggccccttcccgcctggctatctcaccatgatcggaacacctcccactggtccctacctccagcagtggagattacagttcaacatgagatttgaacagggacaactgtccaaactatatcagtgtgtcttttagagttggccatttttgtcacccccactcgtttatttatttttttgagatggagtctcattctgtcgcccaggatggagtgcaatgacatgatctcagctcactgcaacctctgcctcctaggttcaagcaactgaacctgttgagtagctgttgggattacaggcatgccaccatgcccagctaatttttgtatttttagtagagacggggtttcaccatgttggtcaggctggtcttgaactcctgacctcaagtgatccacccacctcagcctcccaaagtgctgggattacaggcgtgagcaaccatgcccagcctgtcacccgtacttgtgatatgattcaacaaacccgtttctatggccaaattggtttgctaattaatgtactatatggactgggattctttggtacaaaacgtgactgtccaaatagcctgactaattatctattttccttaattttttgccagggaaattttttttgtttttgttgttgttttgttttgttttgtttttttgagacggagtctcgctctgtccccaggctggagtgcattggcatgatctgagctcactgcaacctccacctcctgggttcaagcaattctcctgccttagccctctgagtagctgcgactacaggtacatgccgtgatgcccagctaatttttgtatttttattagagacagggtttcactgtgttggccaggatagtcttgatcacttgacctcgtgatccacctgccttggcctcccaaagtgctgggattacaggcttgagccaccacgcccagcctgccaggaaaattgtaaagtctacacacagtggagctactagtgtagtgagcaccatgtgcagttcttgcggacctctccttgcacaccactgtttttattctgaagtattttatagcacgtattgcagtcctgtaaattgatgctattttttttaaagtttgttgaattgcagtatcctaaattcccaaacccatgtccactgacaacctagcacactcttttttttccccaagagaaactcgtttcttattaaattttgcattagtgtcaaatcggttgactgttttttttgttaaagcactgtcatatttttttctataatatatactctttgacctactgtgaaatatatttaaagtagaagatttatgtgtatgtcagacaaattgtgaaagaaaatagtagcaaacttgttagttagccagataatgtgaggcagtttctcactgtctgtctttgaagggagttgcaaatatagaataggggaaagttaaaataaatcctacattgttgaaatgtttggaatcagaggtatcaatgtgaagtcattttttttttaatcagtagacacagaaacagatttagatgtatttgcttagggcttaactttacaaacttggcagaaaccatcttaaccagtaataaagtaaccttactggtaatgggacaggtgtgcctcttgattttttttttttttttttgagacatggtcttgctctgttgcccaggctggagtgcagtggcacgatcttgactcactgttacctctgcctcccaggttcaagtgattctcatgcctcagcctcccaagtagctgggattgcaggtgtccaagccatgctaattttttgtatttttaatagagacagggttttgctatgttgaccaggctgtgcctcctgatttgatgctgaaaaaagcacaacattacttctgtggtattccagataaaaatacattaatcaagaggaaacattttcccaaattaactggtctatgccctgcaagtctggaaagtgtcttagtcaatttggactgctataataaatataccgtagaatgggtggcttaaacaacagtcatttattcctccagttctgtaggctgataagtccaaaatcaaggtgctggcagatccggtgtttggtaaggacccacttcctggtttgcagatggccatctttcttgctgtgttcattcatggctgagagcagagggagaggaagcagctcttgtgtctcttcttataagggcactgatgccatcaggagggctccacccccaccacctcattacctcccaaaggtcctgtctcctcatactgtcatattgagagttaggcttttatcatatgaattttgaggggacacaaccattcagtccatagcacaaggaaaatcatgaaggacaagcaaagttaaggaactattcaggttgagagagacaccaaagagacatgaaaactaaatgtatgaacctaaattagatcttagacataccataaaggacattattagggctattagaatttgaatagagtttgtggattagttggtaatattgggttaatagtaaattcctgttttgttgactgcactgtgctgtcgacaaaatgttagtgacagcaaaatgttgttgatagcacagtgcagtcaacaacatcaggaagttactattactccagtattgccatctagttcacagactctgttcacattcactaaggagagggtccttgtacttgggaataaatgcggaagtattaaagggtaatgggacatcataaaatgtattctttactgctcagaaatgttagcagctagggaatctgggtgaagggtgtaagggaactccgtgtactattgctataacttttatgtatatctgaaattgttttacaagaaacaaacaagatacaaagaaatacctccccaggatgtttattagaacaatagaggctaactataccatttttctatttcttattaggtgcaataaaaggacactggtaactgtaaatttaacagttaaaagtaaggtcatggcggtggcttacagctgatagtgccctgtatactctgtacaagtgcatgctttattatgatcaacctaatggatagttagttttgtttttttttaaaccagggtcttccttgagatgtaatgggcacagagtaaacggctgattgttagcttattctgtggatgtatgtgatgagtgggtctggggcatcagtttctatatctcacctttacctatcaaagaaattggacaaaccatgatagcaaacaaatgaaaagaaaaaggagttttattgttcatgcttacaaaagaatcctgttaatcaatttgtaatccaccaattattttgggaataaaattgtagcaaataaatttaagatagaaacataaaactattaaacatgttatttgtattataatgtaaaatataattaatattttagtatgtacatattaggaataatgtcactggtggccccagaggctaaaaaacagaatgcaaacctgctggaaaatccttggtagataggagcatagaaaacagaatatcaaatgcatttattgttggccaggagacatggactactaggggaaattctgagtgtctaaggatagtactagaatgctaaacagtcacagataataatataaagtaggtaggattaacaagaaacagcacatcacagtcacaatgtgtgggaattaggcaaaggaaatacgtagccatttttatggacgtcttatagtccacttagacaatagatgtattctgtggtggtaaaccaccagcttaggtaatgggatttattggaggacatcagtggtagcaaaatacatatgaaaagcaaaagcatactaataggaatctgatgaaattaagagaataaataatggaggagatattagtgaagaacaagaaaaattgaagaacagtaaaagtaggcatgcttggaaaaggagaaaaatagatctctaataatcatttttggggaggagtatagagcgtcactaagttgaactaccaccaacagccagcattcattgagggcttattatgtactaggtgctgttctaagggcttgacttcattcctcacaaccactccttgaatatgcattttacatatgagaaaatggacacatgaacaattaggttacttgtggaactgaggttcaaacacaagcattgcgaccattcacggcaatactgcatagaaacacaggattccaccataatcaggtaggggagcgaaaggcagtttcaattgttctttatgtaaagaactcatctacctggagttattcattaagctgatataatttacagtgtgatctgcagagaatgaccttatcacaccaatccaaaagaaactactactataattaaactgtgggcaaaataatgtaggatatttttgtagaccgtaaaactgaaattaaagttgttactgatcaattaatgaggtgataattaaacagaaactagccaacctgactgattgtagaccaatacctaaaatttgtttttgcaattcacatcctttgagatatatttaattacatttataacacatggatatttaatataatcttttgtgacagattgacagatcttcactatcattatgtgtaattcctcttgatgtttttgtcattattacatatatatttgggagagaaataaaaggctgtttccaaggtgatggtgataaagagcaaacttataaaaatggttgcctccttttgtttgtataaaacaaccatctcatttccctctgggaggtcactagaggtatgatagctctgttttgaaataatattttagtaaataggaaagcagggtaaagaaagcctcccctttttgtgttatgttaaggtttaaaactgtgttacagtttatactaaaacattaagaatcaattattataagagcattaaattgtttgagttttgtcatgctttgcctagaaatcagcactgaagcgagtgacttagcaacgttattagatctattaaataattggaaatttatgtgcttattgtcagcatcttggctttttagaattttaaagtatgtttgtgcttcacatctctagttgcagtttatgtagaatttagtgaactataataacgttggatggtggtaatgtcacagtgtaattaactgcatagcatacaaagttctttgttaatggggaatgggatatacatcatctatttgatatataagttaataatcatactttttgttagcagtagttaaatgataagaactaaaaagaagcaataaacatctccatctctaaaacagtcttgcaaatatgcagtgagcatctactgtatacaagcactatatcttcatatttagattacatttgctattttgcttttcacatgtgaacttaagtgaaatactctaaggagtattgcaaggtaattgcccctataaattacataatttatatggctctttaacttttttagatgtaaaatgggaggaggagagcgttgagttggagtgtattatttctaggattctttctagcccacaagtcgaatcagaaaacagtggctcatgcctgtaatctcagcactttggaaggctcaggtgagaggattgcttgaggccaggagatcgagaccagcctgggcacatagtgagaccacacctctacaaaaaaaaaaaaaaaaaattagccaggcatgatggcaaacatctgtaaccccagctactcaacccgctgatgtgggcaaattgcttgagcccagggggttgaggctgcagtgagctggatcccaccactgctttccagcctgggtgacagagtgagaccctgtctccaaaacaaaacaaagcaatcagaaatgtacagatctttttccacagtttgtgcagaacagtcacttctaagatatactatgaaagtctattacaggagcaggaactagttattcctttctgagaattagatataacttgaccaacaaatcggttttttatccttcatatcatcttcagaagtagaagcaagatatatgatcaaagtctttttaaaaatagcagaataccggggtttttattttatattttcactctgcacaatgctaatctccttaacatttgatgacaaagaaaaaacttggaatttgtgtatgacaaaaagaatgacttatgaggtgaatcgaaaacactttttacagcctctgtcttcctaaagtttattgtttttggaaatagttttttggcaaatattttgttttgtaagttttacatttctaaagttgaataaaattaaatgtttagcaggtgcttgttgtaatagaagctataatattttaactatgtcatgaggtatctctgaggaagtgtttcttttttgttttttaatggtaaaggatgtcagtaatatctctcaaatgtcaaattaatttagggtgtgtactttctttttccctatgatgacgtagataggaaaatcgaatgttccaaacaactcatggaaaatgttccacttcagcgttatttgtaccacaaatgcagtgaaatgcttttaatggaatccagagtgataggtggattatgacatgtggggagatgccttcttgaaataggacataaatcatggttttttttttttttctgagacggagtctcgctctgtcgcccaggctggagtgcagtggcatgatctcagctcactgcaacctccacctcccaggttcaagcagttctcagcctcttgagtagctgggattacaggtgcccacgaccatgcccatctaatttttatatttttagtagagagaaagtttcaccatgttggccaggctagtctcgaactgttgacctcaagtactccgcccgcctcggcctcccaaaattctgggattagaggcgtgagccaccgtgcccagccaaatcatgtttttgaacttgttttaaatatctgtgtgtgtgtgtgtgtgtgtgtgtatgtatttttttttttatggagtcttgctctgttgcccagggtagagtgcaatggcacgatctcagctcactgcaacctccacctgccgggttccagtgacctcagccgcctgagtaactgggattacagacactcgccaccacgcccaactaatttttgtatttttagtagagacggggtttcaccatcttggccaggctggtctcaaactcctggccccataatctacccgccttggccttccaaagtgctgggattacaggtgcgtgagccaccgcgcccgaccagtattatgtatattctttttgtttgtttgttttttgagatggagttttgctcttgttgtccaggctgcagtgcaatggcgcgatctcggctcactgcaacctctgcctcccaggttcaagcaattctcctgcttcagcctcccgagtagctgggattacaggcatgtgccaccacgcctggctaattttgtatttttagtagagacggggtttctccattttgggcaggctagtctcgaactcccaacctcaggtgatccccccgccttggcctcccaaagtgctgggattacaggcgtgagccaccgtgcccggcctgtcatgtgtattctaattataaataattttcaaccaaactgatatgtttggttaagctggggaaagttttcagaaaatagagtacactgagatgaatttcatgaactgtacccaccaaagccttgtcctggttaattcaaatttataatgccaatagtttaaattagcatttagcctttaagtgacggtggaatggtgaggcatatgatgtttttataccaaacactccgtgctccatgtcttttttggagtttacacttttcaaaaacaggcggcacttccatgtgtttatttccccttcatctctgtttagtgaatgattggtttcatctttacaaagattattctggctgtagtggggagaaccagttggagatatggaagatgtatgtggggaggccagagtatcgtggcagtctgcctgagagatgcagtggccggggtttggtctaagatgttattggtggagacggagagaatttgcggtatttgagagccactccagcctccattatttctaattctatgtcctctacccttctctgtcatctctccactgcctcccagccccttccactgtgccccctgtattgcccactttcagaccaacagccttttgtatcagccttttctggaatgttccactaattacttaccctaactaaaaccttagggtagttttgttctcataccacacgcacctccaagacaggaggtgggattactttcctccttgtgtcattcaggacgactgctccgctctttcttgtaagccctttcttttttgaaatcacatcatcagtcttcactacctcatcttcctcttggcaaccttcagctccccttccctgtatccctctccctgcacgtgaagaccagcagccagttcctggtctgtctgtctgtctccatacaatcattattccctgtattttctctccatccacagacaccactcctgtttttacatcctttatccaatccctggcctggcattatagtcactcactcatgaatacccttaactgctcactccttcattcttccatcagtctcaaacttagaggaactctgcctccaccttccctatgcctgcgcatgagcaccttaccatggctggtgaacgtcccataccaagggcacagttaacatgcgtctgctggtcagggccagctgagcatcctacactgggcagaagggttgctgtttctctgataacttctcctcccttatcctcagtgattccttcctgtcttcaccactgtattcacatgtcccacgctcctgctgcagctgacactacttctgaatgtccctcttctctataccaccagggctctagatctgatcaccatgacttttagttttatttcctctaattcattgtccaagctatagcctgcatgatctttcaaaaatggacagtgtggctcacacctgtaatcgcagcactttgggaggccgaggtgggcagagatcaggagttcgagaccagcctggccaacatggtgaaaccccgtctctactaaaaatacaaaatattagccgggcatggtggtgtacacctgtaatcccaactactcgggaggctgaggtgggagaatcattggaacccaggcagtggaggttgtagtgagccaagatcatgccatcgtacttcagcctgggcaagagagtgagactccacctcaaaaaaaaaaaagaaaaaagaagaaaaaaaaggacagcagacaatggcactctgcaggtggaactgcttcatgtttcccactcctgtccctgttcttcaagagccggcctccccttctctctgctccatccacatgggtttcaaagaagcttagctctttctcaccccagggtttttttctttctttttttttttaaatatgatattccttctagaatattcccacacacccatcactagcatacttaattcctactcacccttccagtctttgctcaagatcacctcctcagagaggtccttcttcctgctgacaagtaaagaataatgagaattcagaagaggctatagaaattggctgggtgtgatggctcacgcctgtaatcccagcactttgggaggccgaggtgggtggatcacttgaggtcagaagttcgagaccagcctggccaacatggtgaaaccccatctctactaaaaatacaaaaattagccaggtgtggtggtgggcgcctgtaatcccagctacttgggaggctgaggtaggagaattgcgtgaacctgggaggcggaggctgcagtgggccaagattgtaccactgtactctagcctgggcaacagagcgagactttgtctcaaaaaaaaaaaaaagaaaagaaaagaaattgctgaagatttgtgatttttcacaatacagttttagtagtcagattatagaaggttatggggaaaggtgtatggtaagaaaatagctgcagagaacttgttttagaacctgtcagagaaaggaagagacacagttagggagctatggagtcgtgcatgtgtttgaaagcagaggcgagacgccagtgtagactgaaagctggagaacagcgaagttaaaaggattaactaagaagcagagagggcatgagatgggagtgaaggaaagagcatggctggttaggcgagaaaataaggacttgggcctatggcttcgattttggtaaagagaagaagtcatctgctgagagtagggggcagggttataattaatgtaagtttggtgcacttgagtccttggtcaatttcagggcaaattatataatctttgtttacattagcatggctgctaaacacctctagcgttgtgtctttggatagtttatgaaatacagagttttttgcataatttaaactactccagtgttttcacagtgctaagacattttgataatattgtctgccttgaaaggagcagattttacttgtgcctcaggatattatgtcatttatcacttcacttttggcttatttttctttttatccccacactgaatttgatttaatttgttagcttttattgtcaattaaaggcaaaatgtcaaaaagttctaacctcaaacagaggtatgtgagcaaaacactcactttataatattggaaatagccatattagaaattaaatgtctgaggtcagatatggtggctcacgtctgtaatctcagcactttgggagaccaaggtgggaggactgcttgagcccaggaattcgggaccagccctggcaacacagtgagaacctgtctctccaaaataaattaataaatatataaatctggaggtggtagctcgtgcctgtagtcccagctacacgggaggctgaggtgggaggattacttgagcctgggaggtcaaggctcagtgagccatgatcatgccactgcactccagcctgggtgatggagtgatgccctatctcaaaaaaacaaagacattaaccatctaaatacatctgaaataaaagggctttgtaaccacagaattatagatgtagcagagatatttgaccttgttagttcaggtctctttcagatgaggaagagagattatctgaaacacattgtaaaatttggtgttgtagttgaagtctgtaaatctacaaccagagaaatagaaattagtatccacctgttaactcaaatgcagtttaaaaaaaacagctacgatttattgtgtgcctactagtgaaaggtctgaagtggttgttgattgcatattgtaatgacagagaaaatgagcacacttcacttgaaaaaaaaactttagagtggatgtagtggctcatgcctgtaatcccagtactttgggaggccgtggcgggccaatcatctgaggtcaggagtttgcaaccagcctggccaacatggtgaaacaccgtctctactaacaatgcaaaaattagccgggcctggtggcaggcgcctgtaattccagctactcaggaggctgagacaggagaatcgcttgaacccgggaggtggacggaggttgcagtgagctgagattgcgagactgtgctgcagcctggtccacagagtgaggcttaaaaaaaaaaaaaattaatgtactgtatgtatatatggtacaaagttcaaaaagtccaaatggatttgtggggaaaaacaagcctccctttcatacctgttcctcagctattctgtcgctcttaagcatttgtccagagatactctttgcatttaaaaacacacatgtatagttatttttttcttaaaaaatgatagcacactgtatacactattctgtattttcttgaaaatggtttcaaatcaatatgtatagagatgactcatttttttaaagaaggggcactaagtttttacattctacagaatatgtatttatttgatatactttaaggaaatctttgctgggtgtaaaattgggggacaacatttccttttttttttagtacttagactatattgctgtgtggtcttctgtatctgtgttgcttttgagaaattagactgacctgagtttttttcctttcttgtacatgatttcttattttttattttttttgagatggagtcccgctctgtcgtgcaggctggagtgtggtggcgcgatctcagctcactgcaacctctgcctcccaggttcaagcgattctcctgcctcagcctcccgagtagctgggactacaggcacccactaccatgcccggctaatttttgtctttttagttgagacgaggtttcaccatgttggtcaggctggtctcaatctcctgaccttaggtgatccgcccgcctcggcctcccaaagtgctgggattacaggcgtgagccactgcacccaacccatgattttttatttctaacttaatacctccatactttctttttattctcttcttttctttcttttccttttctcttctcttttcttttctttctttctttctttctttctttctttctttctttctttctttcttttctttctttctttctttttttttttttttttgacagcattttgctctgtcgtccagcctggagtgcagtggcaaaatcatggttcagtgtagcttggaaggcctgggctcaagcaatctcccctgcctcagactcctgagtagctgagactacgggcactggccatcatgcctggctaagtaaaaaaaattttttttgtagagatggggtctcactttgttgcccaggctggtttcaaactcctggcttcaagcagtcctcctgcctgggcctcccaaagtgctgggcttacaggcgtgagccaccatgcctggccataattctttctctagccttaaagttctataaacataatcaatccacaaattccaggttttacttattttgacaagttttatcctgttatgtatctttgaatgtacatttgttctttttgctttgtgagcctctttggacagttacatattctttctaacccccttcctcctccatatctgttgtcttctcagtaaattggttttatattgttagtcttatctatttcattttatatgatttcttcagtccttatctttcttttagtcacatttattctatttttggttgcttcttaatgtggcttttatctcaataatgttatttttctctccattttttttctgagttctatcagcttgactttcatttccttctgttgttgtataatctcttctttgaacctttgtttttcttctttgagctctttttttatttttatttttttaagaggggtcacgtttcctatggttgcctttgagactttggagaactatttatctgaactcttcctgtgtttctttgagtagttcttgtgttatatgctactaatttacctttttctctgagttttttttttttttccaaattgtatgcagacatcgagtattggttgttttctgagtgttgtttatgttgaaataggccgggagggtaggtgaagcaggctacagccttttttttggacatgttacttagtcatttctcaccaaatctgttatttagtttgaaagggtaggctggttcttcgtgtcggagtctatcacgaaatgccacctccactccacatctgccccttcagtgacccttgactgaagggttgcatgtacacagtggatctggcatggtaacaaggattcttcggttcagccagcccacctttctctggtattaacccgtggttcaaagagacattctctacttctcctttggcctatacttccatctagattccctccttggatgctagcatcattagaatcactgtacctcttattcgggattatgtatctgtgtattgctagaagcctgagaaggcctgtgatggctttccacacatcccttgccccgcttatactggcagataggtttcagtttatgatttggagtcatgatagcttccttgtttcagttgtgtagggaagttgcaaatttctactcatgactcattgtgtagatgatgaaatgtagtgtattttctatcacctatcatctttgtcagaggccctctacctttagtagtggatggtgggaagaaaaatttgtgagtaaacaggatcttggcctctgttggtttaaacagtctctttggggtaatgtgtttcagttttcttctatccccagcttctgctgaggtgaggtctgggagcagtgagagaggcctttgggaatgatgcttagatctgcctcgcggcgctggcatggggagaacgtagactcacacgcagtcttcctgaggctttgctacgagggcctgggtgggtaaccactgagtaacatctctcgctgttgaggctttgaaagccttgaggaggcttctcctgtccttagacctactacagtcggcccatgggctctgcatctgtggatccaaccaactgcagatatttgggggagcggggaggaaaagatttggatctgtactgaataggtactgccttttttccccccatctttattccctaaacaatagaggataacaactatttagatagcatttacattgtattaggtattataattcaaaggtattataggtaatctagagatgattcaatatatggaagaatgtgcctgggttagatgcaaatactacaccattttatatcagggacttggagcatccccggattttggtatctgcagggcggggcgggggtggtgctcctggaacccgcctcccatggattccaaggatcacctgtatttgcctgcagtcatcatggagttccccatactgtgtggtcttcatcctgacccagaccttcactggtcagaacttcaggattcctatcacgatgtacttgggttatttgcccagcccctccctccagccatgctgcgctgttgctgccacgccatattcagaatgccacaaaactgagccctgggcttcactgcaagcctgcagcctcccctacactgtgtcccagaagcagacctcttgcctggatatttttagggcaccttatacttgtcagaatgttttcagcaatctttgtccactgccacccccgccctatccccaagggtccagcagaagaggaaatagtgaagtctctgataatctgattttaatgagtatcttttaagagaaataagtgatagtgggggaattgttagggatcatatatcatagttctgctgcaggtttatctggaaacttgagcaagattaagtatcaccttgttaggttgtctaccatataataataatgtcatctgtaagcctctcatattaaagagttagggaataagcatcagtgagtgaaaggaagaaaaccaatagttctttcattttaaattagctatgatttttaaatttccattacttttatatttatttggaaattattttttttcttttacgagtatccctgttttgaaagattatgggtctttttttgcatattcatgaaggatgactggatgaaatcagtcatttatgattgacagaaatatgacagaactttgcaaagtttgaatggacttttgatattcaacaccaaagaattttgtctaattaaagcttctgtttaattaagataacaatgcatagtccttcattaaaattaacacagaaaaagttcttccttggtccttggagaggatattatatgcaagccctgttgtgtgggttgcaagatgtcactggaatttatatgcattacttgtctaattgcagtaaatgtagcatgtccagataggtttcgagttagaaggctgtttgttacttacggaaatcacttgaagcctcagtacccggaggcagctgttcacaggtccttcacctctccccagagatgactgggaagacgctgttgttggaccctgtctttcttggctggagcagtaaacatgacaggttgtttgggagccatctgtttaaaatggctgctgctttgtatgcagcaatgaacttgagatcagttttctgtctttcttcatggtaatggtcttatttggtgtcacaacaggtggaagttgatgggtcgaaactaaatgtgaccagcacgtggaacctggcttcgcccttattgtctgtcagcgttgatggcactcagaggactgtccaggtgagtgttgtaaggatttccttagagggcctcctcaagtccagaatccttgtcagcacctgtgtggctaatacttagagctataggagggaaaagctgtattttattcaccttatactttttacagtcgaaaactttttcttttcttattttagaggatcttaagttttaacctgagcatttaatgttttcttttttcagacaatccaagaaggttcatgtattgtactttgttgtaaacaaggaattctgcaggcttttctaaaaatgctagattagctgtttttttttttcctctgtgggtttttagttgtaaaatacaacttactttgttacctttcttttctgtgcagttgaaattacgtagtgttaggctagtaaaacttgtgttattcaggttgactttccacagctcactgatgtcctttaaaaatttagtaatcttaacttattaatctttcttttcgcctcaatataaaatgtcctgccttgaggagatgccttggaacccagagtcgatagaacattttttgtaacctgtgacttccattttaaagtagaaagttatgaaaagagattctgccaaaattcttcaccttacctcatatttgaggtttagcgttttaggaaaaaaaaaaaaatcatggaacatgtggctatcacaggctaataaaaatctagccccacccatagcattaaatgctcattctttgttcttttttatgaaaatcatcttaacttgattttacacaggaaactggttttaaaaaccttgagaaatcaggataatcacagattaagactacttactccatacctgattcttatctacctctatgagagaccgggatagtggacatcagaatccacaaaaactatgtgatgactgaactgatttctaagtcagtttcaattgatatattatctctatggttccaagtaaccttgaactcttggtaataagccctatattttgactttggttttgtgacttgtcccagtatattttttctcatttttttaattttctaactcctgtcttttctcatattttataacttaactcatattatataactttatataatattatatcagtataaattatgagttgaaatagtttaagactcttgaaaaaaatatcactacataatttcacattacttagatccatgtattattatgtctttaaaaactgtggtgtctgggcacggtggctcacgcctgtaatcccagcactttgggaggccaaggcaggcggatcacctgaggtgaagcgttccagaccagcctggccaaagacagtgaaaccctgtctccactacaaatacaaaaattagccgggtgtggtggcgggcgcctgtattcctagctacttgggaggccagggcaggagaatcacttgaatctgggaagcagaggttgcagtgagccaggatcacgccattgcactgcagcctgggcaacagaacaagactctgtctccaaaacaaacaaacaaaacaaacaaacaaaaaactgtggttttgttatactggtttatgttcgatagactgtacagtgcatcgaatatgttatggctcaagtgtttgtcagagggacatagtgttaactctcagtagtcagaagaaagaggtacaaactcctattatgcaaattttttgtattgtgttactttcatcatccttttcagtgagtgcgcagatagttgtcttgatggcacttttacatgtagaatttatagctagattaatagggatacatatgtagaataatcaaaaatattttccctagtgtagggatcatgttcggtaaatccctttttaatcctgtaagtactttgctactaaaagaattaatgtgtctgaaataagtgaccccttaaagagagatcccttgactcttaggaagaggtcgttgcatcaagttaagtactctctaattggaaggaaataaactcagagaggtaaatggtgtactaggaaaaacagtcgtttacctaaaaaaaaaaaaaaggtaaggagagtttttccttgtgaaaggggatggattttatttactttctgtaggcattagcattatatcgactctttccaaaaatgtaatgtggcccctatgaagataataacaattgtagtaataataaataacacacagtgcttactgtgttatcaggtgtagttttaagcatagtacagatatgaacttctttgatcttcacaattgtatgaagtaggtgctatttatagttttataaatgagacaactgaggctcagagaaaagtaagtgacttactcaaggtcaccagctagtaagaggtaaagccatgattttttttttttctttttaaatgagacaggatctcgctctgtcacctaggctagagtgcaatggcacaatctgggttcaccgcagctttgacctcccaggctccagcgatcctcccacctgagccccccaggtagctgggactacaggtgtgcctgccaccacacccagctaattttgtttattttgtagagatgaggcctcactatgttgcccaggctggtttggaactcctgggctcaagcaaccctgcctcctccccgaccccccctaccccccacccccacccccaccccccccacaccctcagcctagatccatgatttaaatccgagcagtcttgctgtaggtaggatccttgccatcaagcattgcaggatgctgaggcaagctatgtaacttcctgggcatcacaaagctaggaagaagcagagcaaaaacttggtccgtggcagtcatgtgtgctttcccccactatgctatagtactttgcgatttttcctatcacattcttcttcaaattataattacctgtcattcatgctttaaaccagagatgcttaaactttaatatgcttcagaatcaactagaagccttgtggaaactcaagttgttggacccacccatagcttactctgatttagcaggtctgggctaggtctgcatttctggcaagcccccaggtaatgctgctggtctgggccacatttggacaccctctgctttaaacctttgtagtcagagaatgagctgaggagtggtgtgccccagcaaggtgggtaggaaccgagtcacatgagccttattaaggacataggagaggctctactttatccctaggtcagtagggacccgtggaagagctttcagtaaggaagtgatgattgaacagaattgtagcttacgaggtttttttggtttttggctgctttgtggagagtggcttgaagaagcatgaggtgaagattggaggcaaagagagaagtcagcagatgttagggattcggaggtaagaagtctcagcagctgtggggatgagggcactgtgtgcagaagggatctgcaagcgtgacaggagaaagaactggtggctttacagtcatctgctgatttctcttctgaccactgttagcatgggcaaacctccaaattctattcctgactcccccttttctctctctgcttgcttcctgggctgcattgctccaagagttccagcttaacacctccaagcagatagctacgaaatgcaattataagtgtttgtgtgtctctttgcaattgtttattctgagaaataagggatgaatattaccaaaggcatttttcaagtgattttacagtaatcacttgaaattgattactgtagtaattgattactatagtaactgtaggtactttaaagtaataactacaattcttttttctctggatttttgagcatacatataaactttatattcttaaatagtattaaatattactatttatcattaacttgtatcattaaattttattattaaacctcatttaatataaaataatatgtattattattattttgagacacagcctccctctgttgcccaggctggagtgcagtggtacgatcttggctcactgcaacctctgtctttcgggttcaagcgattctcttgcctcagcctctggagtagctgggattacagacacgcactaccatgcctcgctaatttttgtatttttagtagagatgaggtttcgccatgttggccaggctggtctcgaactcctgacctcaggtcatccacctgcctcagcctcctaaagtgctgggattacaggtgtgagccatcacacccagccaaaaatatttattatatctatataaaagctaaagaatgacccaatgaaaacctgtttacccactatctagattaaaaaaaagaaaacaggctggtcactgtggctcacgcctgtaatcctagcctttgggaggccgaagcaggcagatcacctgaggttcggagttcgagaccagcctgaccaacgtggagaaaccccgtctctactaaaaatacaaaattagccaggcatggtggcgcatgcctgtaatcccagctactcaggaggctgaggcaggagaatcccttgaacccgggttgtggtgagctgagatcgcgccattgcactccagcctgggcaacaagagtgaaactccgtctcaaaaacaaacaaacaaacaaaaaaccaaaacattatcagtgctatttgtatcattcttccttgattaaatcctcctttccagtgtccctgaagaacaccattatgagttttaaattgatcactaccttgcttttctttagggatatttatgaatacaccaacactgtgagcagtatcttgttgagctgctcttgtttttgaaccttgtaattgcccccatcctctctgtgttcctccaggagttgtcttctccccaccagcatgatgtttgtgagcctggcccatgttgctgcctatagctgcagtttatctacttccatacatcatattaatattaccaccaattacttattctcctctaaatagacatctgtgttattttccttattttgttgtcacagtgatgcttgtatgaacaccctacttcctgtttcctcttgacataggaggttctccaggtcatgtgccggtataacagccatgctgtggggcctgtgctttctcattcctgcatggcaaggccaggtgggtttctctgtgtggctgtaccagcttatgtgcccatcagtagtgaagatgatagtcacaatgagaacaatgaactaaccttattctgtacttattatgcccggcactgactgttctaagcactttgtatgtatgaatgcccccaaaaacccaataaagtacgtactagtgttatccctcattttgtatttgggaaaacagaagcttgtagaggctaaattgctttcccatctggtagtaaatgggagtgccagaatttgaaccaaggaatctgtgcccttaacattttttttcacatcctggtgaacccttggccttcccagactacttaggtttttcctgactggtgggtttagatggcatctcattatggttttaatgtatacttccctgattagtatgacaatgaacattgaaaatatatatttattggctctcttgttttctcttctgtaaaatatctgctcatgacttttgcccactttttaaattggattatctttttcttattgactcataaaagttcttcctgcgttatggctcctttttgtcgtatgtgttgataaagtagcttctgtttttattgttttaagttatccaagttaagttttaaggcaagatttaatgtcagaattttcaatattttcctttatggtttgtgtgttttgcgtttgtgtagataatcttgttctactcctaagctcacaaagatacctatattttcttttaaacctttttaaattgtgcttttcaaagttaactacttaatcctcatgggattgatttttgtacacggtatgagtggctcacgcctgtaatcccagcactttgagaggccgaggtgggtggatcacgaggtcaggagatcgagaccatcctggctaacacagtgaaaccccatctccactaaaaatacaaaaaattagctgggtgtggtggcgggcgcctgtagtcccagctgcgtgggaggctgaggcaggagaatggtgtgaacccaggaggcagaacttgcagtgagctgagatcgcgccactgcactccagcctgggtgacagagtgagactccatctcaaaaaaaataataataataaataaaataaaatacagataccaggccgggtgtggtggcttaagcctgtaatcccagcactttgggaggccgaggcgggtggatcacctgaggtaaggcgtttgataccagaccagtctgacctgtaacatggtgaaaccctgtctttactgaaaatacaaaatattaaccggggatggtggtgcacacctgcagtcccagctgctcaagaggctggacccctgcactccagcctgggcaacaaagcaagactccatctcaaaaataaataaataaataaataaataaacaaacaaacagataactcgttatgccagcacaatttaatgatagtcgtgcttctcttcccttactaccttgccaccacctcacctttccaaccccgaaattctttaaaagcggtttctgtgattctcaattaattgtaaataaaaagatgatttttcgcttaatacgatcctcagtatatttgcttctgtgagctctcagtcagttgcactcttttattttttgttaatcttctggaaacccttagccaagggcatcagatgatatttgagatacaccttagaaaaacgtgtttgtgaatcaacaggcaaattgggaagtattcatttagggaagtaatgagagctaaacatggaaaaataggttggaggaccagatagtgaatgagagcctgaagaatctatgcttttcagtcagcagtggagatattacaactttttgcagagtacagtaacgtccatcaaaatgccattgtagaatattaatgtgtcctcataatagaggaggggttaagggattgaagggtgaagtggagatggagttcatttagaagacaatcctattactgccttcatcctccactagggtgcaagcagtgtagagaaaaagggggttgagtttgagagaaacctatgtttccatgcatagaaaccactttctgtttctatgaatttgactactgtgggtatgggtaccgcctataaatgaaatggtatagtatttgtcttttgtgactggcttatttcacttagcatactgtcttcaaggttcatccaggttatagcatgtgacaggatgtctttcctttttatggctgaataatattccattgtgtgaatatactacatgttgtttatccattcctctgtcaacggacatttgggttgtttctaccttttggctgctgtgaattatgcttccatgagcatgggtgtacaaatatctgtttgagtaccccattcttttgggcatatgcccagaagtggaattgctggatcacgtggtaattgtatgtttaattttttgaggaacctccatagttgctgcaccattttacattcccattagcagtgcacaataatttcagtttcgtgccatctttgttaacacttgttattttctgttttgttttgttttttaataatagccatcctattgggggtgaagtggtatctcattgtggagcaggacttatctagatagtaactgaagaaaaagcattccgaatacttctaggatgtgtccttcctatattggtattactctgtaaccagttcactgcacaagtggcacttttttcagtccaagtagaagcaagtttcttagagctgtttttttttttaaaccctttatttcaacttctttccttcccatatataaaaccacataccattctaacagtctgtaatgttgctaccaggtaataaacaagccatactgtatttgggagaggagggtgtgtttcaaagtctagttcattgtaatatcaaaactggtaaaacctctcctctctaaactcagtttgacctcacactgagaaacctttactagtgcagaggagaatgttgctttcttcttgcttgctttatattgtaggggcaaaagggtgtgatcccactcctccccatcataagggtgtccatggcagacactcctataacaaaagacaggttaacaagagaaaagtataactgatttatttaatcaaagttttatgtgacatgagagtcttcagaacagagatccaaagatacaaggaaagctgtccattttaatgcttaggtttaatgaagaatgggcagccgtgtaaaactgatgggacaaagaatgtaagtgaatgctagtaggctgagaggaacccagcaaggcctatgttcagatcttcctggcctctcttgtactatttcttcctcccaggtatgggacaagacccatctgggatgacggtcttatgacctgctactgttgtagagaagggtaggccagagaatttctttatgagcagctcttagaaaggcagggaggggttagagtcctctttctggtttcatagttgtctttgcgggagaggaattctgatgtctgtgactcatctcaggagagaatgaggggtgagagacaggaaggcagaaggtcagagatcttagttctgaggttacttctgaggccttctctttggggtatcattttctgagcctcaacaatacccttttctacttcagagctgctatattgggtctctcagaatttgcagtatggggtaaagatgagaagagcatggcaggaagaaccaggttttctggggcagaggcaacctggcattcactctcttggggcatggcagatgtccaaagctggccggtagccctgggatactttcatgtggatttgggggaacttctcacctgcagaacacttaatgcctcctgtcttttccagttgcctttggtctcctgagcaactactgtgttgactctgaatgttctcactgggcatggtccctcataatgaccccgcctgcttttctcctgcacaatccacgtctggccacaggaaatagtaataagtccttgcctcaccaaaccaacaaagtacaagcttctcttcttggtctgtctctaagaattcgcatgaataagtgattctcatgaagtcgctttcacgtagcttaagcagagttcagccttaaattctaagcttaagaattcgacctcctcaaattaattttcctcttttattcttttaaggtgggagatggacagtcactggtcccacagcttcctagcacattctaccaggtagccttggctagcatctgacttaaagatgtatgggtacttggcgtctacttctttttgttgctgaacccctgtgattccatgaaaagtagtgcgttcatctgttcttatattgctataaagaaaaacctgagactgcataatttatcaagaaaacgggtttaaatggctcatggttctgccagctgtacaggaagtatggtgccagcatctgctcagcttctggggagggaggcctcagggagctttcagtcatggtggaggcaaagcaggaggaggagcatcacagggcaagagcaggaatgagggtgagagagaacggggaggtgccccactcttttaaacaaccaagatctacctctgtgatccaaacacctcccaccaggccccacctgccatgtcgagaatcacatttcagcaagagatttggagcggacacatccaaaccatattaaggagcatttaacttctttatctgattagatgagtaagtagttgggaaggcaacttacctttgcttcaggaattagctcccgattcatccagtccgatcacgtgtattcatgttcctggttttcattggtaaacttcataagtttaatattacccattaaattcctttaaaagtaagttgtattttggtgtatactgtcactggtagagggtcatgattgcaagttatccaggttcttggcgttttgaacaaagaattggacaacatgtccagcaaagcaaacaatgaagcaacaacagaacaaaaacagggatttattgaaaacaaaagtataggcggccaggtgtggtggctcatgcctgtaatcccagcactttgggaggccgaggcaggtggatcacctaaggtcaggagtttgaaaccagtctggccaacatcgtgaaaccccgtctctactaaaaatacaaaattagcctagtgtggtggtgcatgcctgtaatcccatctacttgggaggcaaagacaggagaattgcttgaacccaggaggtggaggttgcagtgagctgagatcgagccattgcactccagcttaggcaacaagagcgaaactctgtctcaaataaaaaaaaaaagagagagagagaaagaaaatgaaactgtactccacagtgtgggagcgagcctgagcagtggctcaagggcccggataccgaatcttcttggttccaaatacctgctagaagttttccattgattactttatactcacctcatgtaaatgaagttgcagcctataaggttgcagaaagcagccaaccagaggctgaagtgaagttacaaaggtcacactcctgtgcaaacatgttgcaaagttatactcttatgcaaatgaagacttggctggcaatcagtctgattggttttggacagcaaccattcagagactggagtgaagttacaaagttgcaaagactggacccacagtcaatctgattttctgatttgttattggatgggaaattgactgtccgatttcccatctgccacacagaaaaggtgggtggtttgcaaagggagtagcccctggtccttttattacttaggtgtggaaagctaggattttcctttcaatttagttctaggaagttggcgtgaaacagccttgggttccctgcctccagaccctattctcctgcctcagtgctatcattagaataataaatttcataggttattaacctcttttaattgatctaaatcacctgtttccttttggatttgacttttaattcccactgccctgctgacttctcggcgcatataaatgctcaataattggatgaataggtgtgggtgggtgaatgggtaagtggacagtcatcttacattatagaatgttttgctgattctttttagttcctgacctcccaacatttgcgaaatccatactccattagtgtggctggtggacctctcttgatacagaataaccatggtttctgtgagagcaaaaagaaacaagagggctcccaaggacttgcccacagaggcgctttgctcaccaagcatggttctttcctgttggcctctgtttgctctgggtagcacctcggctgttttaggcccacagtatcacctattgacaagtgtagatagctattgatagtatcaataggtgtaggaaagggtctgcctcctgctattcctggttttctctttctcaaaggcttgtgcatgccctaggctttctcactgtccgttgctgggtgaggtcatatcagctcttactcccacagaaccacccgcacctgctttaagtacgctgcctttctgacttcaagaaaatcatactctcggaaaaagtctaatcattgtggataactttgaatatggagctagtgatatattacctaagggaggaggaaatcacatattttgaaatgataaagaaccaggggcataaacattgagaactcttgaaaataattaaaagttctcttcagaattttaaagtctttttctattaatttctctaataatttagccaacttttcttcaaatatcatcatttaaggaaaatgaaataactattttatatttatttgtttatttgtttttttttttaccagtgtttctgttttcattgccgaagtagtcagttggtaatgacgtttattaaatagccttatctaatagaaggctaacacaagccatatttaaaatttctttgttttaattaattagctctttgttttgttttgtgtttgagacggagtccgttgcccaggctggagttcagtggcacaatctcagttcactgcaacctccgcctcccagactcaagcaattcttctgccccagcctcccaagtagctgggactacaggcacctgccaccatgcccagctaattttttgtatttttagtagagagggggttttaccatgttggccaggctggtcttgaactcccgacttcaagttatctgcccgcctcagcctcccaaagtgctgcaattacaggtgtgagccattgttcccaactgtcatttaaaatttcttagtagtcatattaaaaaagatgaaacaagtggaattaattttactaatacattttatttaaaccagtgtacctgtggagacaaaagtgattccatcttaattgctaatgcaccatgttgttttttttttcttgaaggcaaaccttgttgttttaatgtaatttattttttattttactttttttttaatgatagggtcttgctctgttgcccaggctagagtgcagtggtgcagtatggctcactgcagcctcaacctcccagactcaactgatcctcctgcctctgccttctgagtaggtgggactgcaggcctgtgccaccacatgcaattaattttgttgattttttgtagagatgagggcacactatgttgcccagaactcctggactccagtgatcatcccgcctctgcttcccaaagtgctgggattataggcctgagccaccactcccagcaaagccatgttgatttctcattagccccagtctcgtgaatgcctcctgattctgattttatttactgtttttagtgtaagaacaaagcagccttgatcttaccacacaaattataggcagtgacgcacatagcattcccacctgttctggaggatgcctttaattgcctctgtagagcacgtacaccctttccctgtggcatataagctctgggtctggccagtaacagagtgggttatacctgtcttgcagccatccgagatcacgcttctgtctgtaagttcccccaagaaaacaccctttaccaacaaattgagtttctttgccttattctttggtttcttggctccctccgcatttgggggctgctttgcatttatggccctttcacagaataataccccaaatgttgtcatttcaacatgaaagacttttaaaaattactaatgtgataccagaaacaacatagacattggcattaatacaacagtatcttaaacaatggaacggtcagagtggaatgtagtcctaccaaaacaatggagttgggtttaacagaaaattacactgcttcagttttaaaattaacattaaatacaattgaaaatttaactcctcagtcacaccagtcatatttcaagttctcagtagctacgtgtagctagtggttactgggttagaccactcacaggcaaaattttttgtaaaccagagagtgtttacagatagagaaaactctacataatggtttttaaagtattcccccttaatgtcaaccacagttttggtttttatctcttaaaatttggaatagatgagttgaatttatttttaaacagaagatgaatttatcatctagctgacaaactttttaaatttcccattagaagatttaaaaaattacaaccatttttaaaacgtggaatgatttcctgcctgtggcatataattaaagtgatgaaacaaacagaagattcgctgtgtcctggccatggtgagctcactctctgttttcctcacaaaccccagaacctttgtagtgtggaacctgctggatgaatagaagttttttattttattttatttttttactatgtctatattcctgtgaagtaatttttttgaccttgaaagaagttcttcaattttgctgttctctatttcttacagtgtagtttgtgtaccgggatttaatgtattgtttgtcgttagcgttttacatactagattttcatcgtgcatagtcacgttgtttgaacatttgcaagcagagccgactaactgctgttggcctgtttctttgtatggcgtgatttcttctatccacctgctcacagcaggttgccttcaggcctgaggagtagctaaatacttttgaaaatatcttgagatcctgctaaggtctaacaatttctgcatttgtgtgatgtgaagctattcatgctgtacctttgaagacttttttctttctatttctcatattcttgctcaaatattttcaaaagaagataaatttattataaataacagtgcagagctgattgtagcaccactgcattctatattgaataggtctttgatattcagctaagtggaactaattttctatgttaaagcagacaaatttggaatagtgtcacatgaatctcatgttatttactgaagaataccagattaaatggattagttgtgaaatgactagagtattaaattatatatatatatatatatatatatatatatatatatatatatatatatatataaaacgtgataacttaaaatgcccagtgggcctatgtaatataaaatattacacaagcacatgaatatgatggacgagatgttattctgtttgcagattgtgaaactatctgtagtatatatacaaatggttgtccacacagaatttgaatcaattttaaaattgtaaccttaaatttcagttttgaagaaaataaattgttgattttcatatctacttgagaggaagttaaaaatgttattttcttttcagttttttttagattaaaatagctcccacaccctccaagaataaactttagttttaatcctaataactgtttatagatagtaaaattaatattttaattagaaaaataaagcggcatacatttttgcctgtactttgctggtacacaaatgaattgggaagtaattgtcttatgttttcagtcctaaagtgttttacaggttttaaaaatgttccccccacccccatctgtttgaagtcattattattttgtactttacacatgtgatttctctagaatcattgcatgtgacatgacactctcaggatatataggatatataaatatataacttagaataagtagaggttggtatttttcgaatgaagtaggaaatgaaagagtaattattaaccatatcctttttacattcctgacatatcaatacagctacacatcttagaaacaagctcaccagtagaacagaaataactctgttgactctgctttaaaatatttcaaggcagtttaacagctgggatgtatttacagctatggtataaagtattaattttgatgcaaggctacctgcttttgtaatgtagtcctagaagcttagcagttttctgggttttataatttggagttgcttttaaaatttaaccgaatgggaaaatgtctttctgaacttccccttcccacacccccacacatacaagcttttctcctcttctgttaactagaaaattatattttcgttgctgcctgaggaagagaattttgagtagtataaacactgattgtagtaaatgtggaaaataatacaaacagctgcactgcagaccgataagacaaatcccacagtaatggcctttaaaacatattaccaagttggaaatcagtgaggggaaaaagaaaactattactatttcttcctcttactgttcagtgacattatttttaaaggtgaaattacctctggttttattatcctaggaaggtatttttggaacatttgatttattgttttgcaaatgtttttgcctttgtgtgaataactttgctaattttgtatgaatttgattctaacaaatgttgaagtcattttgttaacaaaatcttctaaagtattttttaaagaaataaaaaggaatatattatgtaaacattggagcagactatcaaaataagaaaaggagaacatttttatctggctttggagtgccatttaaaataggaaaagggatgaaatatttgcagaaaatattttaataagcgtggatatgtttcatcaaatacaagtcttaatttttatgaagaattttgctattagcatatcaagtggtcagttcatatttgttttggcatgcattagactcatgataggcattgaatactttgttttttgtggattctaaaactgaattatcttaatcctaggctctaggaaaagtatatcttactgctagggaagattgaaataaattccagttctgagtgaaattttatttctgtttttctttacatcaatcttttctttttccttttttcttttttttttttttttatttttgagacagagtcttgctctgtcactcaggctgtagtgcaatggcatgatctcagctcactgcaacctccgcctcccaggtttaagcgattctcctgccttagcctcctgagtggctgggattacaggcgcgtgccaccatgcccggccaatttttgtatttttagtagaggcaggatttcaccatgttggccaggctggcctcaaactcctgggctcaagtgatccgccttccttgacctcccaaagtgttgggattacaggcgtgagccaccacgcctggcctgtccttccttccttccttcctttacaaactgtgggagagtggtgaaaaaaaggtgacagtcattatatatgtaattgtgacctgctttaaattgaatgcaatgttaaggacagcttattggtacttatacctatggtcacacattcattgatacagtttgtttttaatgtgaaaatttgtttccattttacataatacaaaattacttctatttgcctgggaatgaatctaacctttgtagtgtcagccaaaggaatgataatattgttttagtgtctcctacatagaagggaacgcccagtatggcctaggcagtgttctagactctgcagatagaacaaggaacaagacttaccttccagcagggggaagtagatactaaacatgtaaatacctaaataaggtgattttagtactaagaagttggatgaagactatgaaattgatagaaagtcactagagaaggcagctttagcaaggatggctaggaagtcctctctgaatagctaacactgagctgagacctacgaagaggagggggcaaacgtgcagaagtctgggggaaggaagtcccaggtagcagaaggggcaaagcagaggctctgaaacgggacaagcttgttttgtgtgaaggccagttggggagagtggaacgaggaagacagaaccagatcatctaggggccaaagaactgttttgttttgtgttgtttctttctattcatgttgtggagcgtttggagggtttgggtaggagagtgatgtgatgtgattttttaaatcattgcaggccttggggtagagacagagaaatcattgatttgaccattgcagacctcaggtgagaggtactggtggcttagaccaggaggcaccgtctgtttctatggggctcacaacttgagtggttattacatttttaaatagttgggggaaaaaattaaagaagaatgtttcatccagcctgggcaacatagtgagaccttgtctctacaaataatttttttaaaaattggctgggtacaatggtgcatgcctgtgggtccagctgcttgggaggttgaggtgggagaatcgctggagtccaggcagttgctgtggagagctgtgaccatgccactgcactccagcctgggtgacagcatgagacactgtcaaaaaaaaaaaaaatcaataatgtttcatgacccatgagaagtatgatgtcacattcagatcttattgatgataagcagttaactagaacatagccacattcattcatttttgtctgccatgtatagctgcttttgcagtttttgtcgtatgaagctgaatgcacagactttcttgccacgcagcagttcagtgggttattgtgatttttttttttttaatctcaggaccaagattaaagttttttgtgcagagttgcaggtagccaaattactttttgtattcctgtgccttagattcctcatctgtagagcaaaattgagatcgtctttcaggtctgtttgctctccacatcctaaggtcctaggtctgaatcagacttagttcttctgttgtggctgcttagcacatcaggctcctaactgaatgattgtagtggtgttttactcggtctcctagcctcgtccttccccattctatgtatcttcagcatgacctcagaccaccgtctttctaaaacatgagcatgtcacactccagttcttaactgtaagaactttgtcaggtatgagctctctttgtacaagatctgacctgggtttataattccttcctggtttcctttcttgccacttccaccttcatccaaccctatttctggccacgctgaactgcttaacattccctaaacttgccatgccatcgtgccatcccttaatctgaaatttttgttaactgtctcatcagcccacaatttttttttttttttttgagacggtgtctcgctctgtctcccaggctgaagtgcagtggtggtgcaatcttggctcactgcaacctccacctcccaggttcaagtgattctcctgcctcagcctcttgagtagctcggattacaggtgccaccaccacgcccggctaatttttatatttttagaagagacgggatttcaccatgttggccaggctggttttgaacaacctttttttttttttttttttttttttttttgagacggagtctcgccctgtcacccaggctggagtgcagtgatgcaatcttggctcactgcaagctctgcctcccgggttcacgccattctcctgcctcagcctcccgagtagctgggactacaggtgcccgccaccatgcccagctaatttttgtatttttagtagagatggagtttcaccatgttagccaggatggtctcaatctcctgacctggtgatccgcccaccttggcctcccaaagtgctgggattacaggcgtgagccactgcacccggtggttttgaacttctgacctcaagcaatctgcccgcctcggtctcccaaagtgctgggattataggtgtgagccaccgttcccagctgtttttcagttttcttttggaaaattcctgctcatttttaaaatttgtaattggtttttaattgataaattaaagttgcatatatttgtcatcctgtcttagtagtgtcttttgtgttgctacaaaggaatacccgagactggataatttataaagagaaaaagtttatttggctcgtgattctgatgtctggaaaagttgaggattaggcatctgatgaggacctcaggctgcttttattcatggtagaaggcaaaggggagctggtgtgtgtggaggtcacagagtgagagagaagggagggaggtgccaggctcttttaaacaaccagctttctcaggaactaagagcttgaactcgccctcaaagagggcattaatctattcatgagggatccttcccaatgatccacacacccccattatgccccacctccaacactggggatcacatttcaacatgaggtttggaggagataaactttcaaactttcacacatgtacaacatgttttgaagtacacacttcaaacagtggatacactgtggaatggctacattgagctaattaacatatatgtattacctcatatacttattctgtatgtgaggtacacttaaatatactcagaaaatttcaagaatatattaataatacgtcgtcattaactgtggtttctatattgtataatagctttctcgtacctatttctcctttataactgaaattttgtgggttttgattaatatttcctcaacaccccctccccaaccaccattctattttctactctatgagtttgacgtttccagattcttcatgtaagtgaggtcatatggtatgtctttctgtatgtacctggcttattttacttaatgtaatgtcttccgggttcatccatgttgttgcaaatggtaggattttcttttttaagtctaaataatattccattttgcatattataccacattctctgtatccgttggtccatggatggacacttaggctgattccctgtcttggccatcatgaatagtgctgcaagaaacatggggatgccagtatctccttgacataactgatttctttcctttggatatatatgcagtagtgggattgttggatcatatggtagttctatttttaatgttttgagaaacctccgtactgttttccataatggctgaatcttgttcatgttttttttctttcttttcttttctttgtttttttgaaacagagtcacgctgtggtgcccaggctggagtgctttggcacagtcggctcactgcaacctccaactcccaggttcaagtgattctcctgcctcaggctcctgagtagctgggactgcaggcacctgccaccacgcccggctactttttatatttttagtagagccaccgtgttgggcaggctggtctcaaactcctgacctcaaatgatccacccaccttagcctcccaaagtgctgggattacaggcatgagccaccgcaccctgcccctgtttgtttttaaatatccagctttaatgtctgtcttaacctatctaatgtcttccttattaacctttctgctcatttagtcggtctgtcctcttatcccataatactttgtacattttgtactatgcatttatcgtattgaattatacttatttttccaataattctgctgtcttttccttagtctcttggaaggtgggtcttaattcagccagcagtgcccaacacagttgagaggtagatggatgattagatggatgaccaacgtagaaatgccagtgtcaaaacctaggaatcaaccctccgttcttaactgagtctccctaagacacaggaaaggagtctattttattccattttgttttctgtctttttttgcctttattaagttcaacatgtgtgtataaaagaataggaaaaacagataagtgaaaacgagagtcaactaatatttttgcctagaaataagttttatgtgcactaattctagaatttttctgtaacataattttttacaaggcttattctgaacatattgttttgttcttcttgcccttagaaataaactgtaagcgtttttcatatcttgaaactttttaaatggcaggctggatatataccacaatttacttagctagtgtctttccccgtcatttacatttcttgccattgttcagttctataaactacactgtgatatttgttcagctttatttttctgcctatccttacattttttcctcaggataaattcttagaagtaaaatgggttggctgggcgcagtggctcacacctgtaatcccagcgctttgggaggttgagggagcgggttatgaggtcaggagttcgagaccagcctggccaacatggcaaaaccccatctctactaaaaatacaaaaaattagccgggcatggtgggagatgcctatagtcccagctacttgggaggctgaggccggagaatcgcttgaacccaggaggcagaggttgcagtgagccgagattgtgccactgcactccagcctgggtaacagagtgaaactttgtctcaaaaaaaaagatgtgaaatgggttggttgggcatggtggctcatacctgtaatcccagcacttttgggagctgaggccaggagttcgagaccagcctggccaacatggtgaaaccccgtctctactaaaaatacaaaaattaggcagatgtggtggcaggtgcctgtaatcccagctactcaggaagctgaggcaggagaaacacttgaacctgggaggcagaggttgctgtgagccgagatggtgccattgcgctccagcctgggtgacaagaatgaaactctgtctcaaaaaaaaaaaaagaaagaagtgacatgggtcaaaatgctcccatactgattttttttctactctataccacactgccttaagtatgctatctagattaccattgtgtcaatttacttggcaatatttgcaggtaggggaaaacattttgcattaaaccactgtctttcttattgatctaacctccctccgtcaaggaaccgaggactcagcttgatttctagaggttcactctgggttctattacttctgtgatcatagagatcagagttggtaaacctccacttctgtaaaaaggaatgaaattaggatacatctgtatcgtaatgctcatggcatgtagttgagtgaaagccactaatactctacatctgggaacttaaaaaaatgatgctggcttagttagaactgctttatttgtgtgtgtagtctttgaagtcactgagccctctctgattagccagaagaggaagaattctgaggaatacgttaggattaagtagagcaagttttttttgtttttgtttttgttttttgagacggagtctcactgtcatccaggctggagtgcagtggcaggatcttggcccaccacaacctcacctccgcctcctgggtccaagcaattcttctgccttggcctcccgagtagctgggactacaggtgtgcaccaccacgcctggctaatttttgtatttttagtaaagacggggtttcaccatattggccaggctggtcttgaattcctcacctcgtgatccgcctgcctcaacctcccagagtgctggaattacaggcatgagccaccgcgcctggcccaacagaccagttttgtaggtgagaattatctcacagtgtagtcagcttccagtgtactacttattcacccatttttagtagcagtagtagttacttttaactaaaattttaatagtcatagtatttacttttaattaaaattcaaacaagatatatgcaagtgatatatttgctgtaaacaaattttatttataaataaatgaataataaagaggttatttctttcactactctctggacatagaattgcattgttgttttaaacaaatgctaattcattttctataactattttattgagatataattcacacaccatacaattcacccatttaaagttacagtttagtggtttgtagtcaattcacaggggtgttccaccaccaccacagtcaattttagaccatgtttatacccttgagaaaccccacaccaattagcagtcatctccatgtcctcccagacctcctcttggaggcatctaccaatctaccttccatctccatggattttactattctggacatctcttattaagtggaatcatataatgcatgatccttggtgaccaacttctattgtagcatgtatcactacttcattcctttttatggccaaataatattccactgtatggctatactatattttgtttacccatccatcagttgatggacatttgggttttttggctatcgtgaacattacatacaagctgtgcagatatgagttcattttatatctcttgtttgttttttagtgtctttctcgagaagcaggtggaaacatgagcattcagtttcttggtacagtggtaagtatgaaatcattctttattctcttaatttacagagaaaaaatgttcaactagttgtagctcatgtgtttgaacttggcttcattactgctagatatttaaattacctctacttttttgcctttacaaatgatattctagggaacaacttcatatatttcactttattttagtgtttggaattattatcttttttgagacagagtctcactgtgttgcccatgctggagtataggggcacaatctcagctcactgcaacctctgcctcccgggttcaagcgattctcgtgcctcagccacccaaatagctgggattacaggtgcctgccaccaagctcggctaatttttgtgtgtttttttctaaagatgaggtttcaccatgttggccaggctggcctcaaactcctggcctcaagtgatccatccacctcggcttcccaaagtgcgggattacatgtgtgagccatgtccggcctggaattattttcaaatgtggataagatatttttaaacatgtatgatatattttctcccaaatagaatcaaagtcataaatagttttatggcttattatacatgttgcccattattttatgtccctttagaacaccacccatcatatattagaacacaactttgcattgtcacctagtgtgagttgtaattttcaagattagtaaacttgatctgctgaagagtttcaatttattattactattttacttataagtttataattagtattagttactataattttcaaactaatttgtttaaaaaggtaccttatttggcttggtgcggcagctcacgcctgtaatcccagcactttgggaggctgaggcaggtggattccaaggtcaggagtttgagaccagcctgaccaacatggtgaaaccctgtctctgctaaaaatacaaaaattagccgggttgtggtggtgggcgcctataatcccagctactcaggaggctgagggaggctgaggcaggagaatcgcctgaactgaggaggtggaggttgcagtgagccacgattgtgccactgccctctagcttgtgtgacagagcgagaccccgtctcaaaaaaaaaaaaagtaccttattttaattttcatttttctgtttattgctattgtatttgaatatttctccatgtattcattcaccagatatcatttctaatctgtgaaatgtctgttcatgtcctttgggtacctcattcaggatatggattcatattgggcatttcagataactctggagtttattaagaatatcagaggtattctgcaagaatatcaagaggtatttcaggcgagagagcttgcgtgaaaaagggttttgcagccattgagataggaaggatgttaataaaatgtgtgtttactgaatgctttatcgattatagagatgtatatataatttatgtatataaagtatatgtataggtacttggtcaatgtaacctaaattttaagtattggaactaagttttgtgattattcttgtttttctgattagtaaggtaatacatgcttattgtaaaacatttgaaatacaattcaaatgtatgtcataatatgttgcattagtcaagattctccagagaaatggaatcaacaagatgtgtgcgtatgtgtagagagaaagagaaagatagatctaaggaattggctcaagcaattgtggaggcttggcaagactaaaatctgcagggtagatgagcaggctggagacccaggggagcgttgcagttcaagtccaaagacagtccactggctgaagccctccttgcttggggaggtctgtctttttctcttaaggcctttaacgggttggatgaggcccacccactgtggagggtgatctgctaaactctaagtctactgatttcagtgttcgtctcatctaaaaatatcttcgatgatacatctcagtgtttgacctaacatctgggtaccatggcctcgtcaggttgacacataaaattaaccatcacagaagtatatatcctatccctagaggtttttaagttattagcaatagataattcttccagaaaattatgcatcttttcatgcaataatagatcttggacacctttctgtgtcagtccgtaagatggacctcagtcgccttaagggccacacagagctgcattacgtggatggagaggactgctttcactcctcagtgttcgtgctgggaagtccactcatgctgtctctgctacttagcatctctactgggtttctaatcggtttctcaacttcatgtatcggaaactgagctcgaaaagtttctccctcagtttttcctctctctgaaaatggcaacttgaactaatccttgattactttctctcctcttcctctctctcctcttcccctcctctcctctctcctctctctctctctctctctctcttctctccttcctctccctctctgtcctcttcctctcctctctgtcctcttcctctcctctctgtcctcttcctctcctctctctcctcttcctctcctctctctcctctctctcctcttcctctcctctctctcctcttcctctcctctctctcctcttcctctcctctctcctctccctctctctcctctccctctctctcctctccctctctctcctctccctctctctcctctccctctctctcttttctccctctctctctcctctccctctctccctcctctccctctctcctttcctcctcttcctctctcctcttcctcctctccctctctcctcttcctcctcttcctcctcttcctttctctctctcctcttcttcctctccctctctctcctcttcttcctctccctctctccttctcttttttctttctcctctttctcgctcctctttttcttctctctctctccttttctcttttccccatctgtctctccctgtctccctctcccctgtctctgtctctgtgtccccacgccccccactcctggccctgcctttagccatctcttgtttggaggatggcagtagctggcgtccacctcactgccatgctactccctagtccatcactaatagagcaggaaaaggagtcctttgaaaacatcccttggttggccttgttgctcttcttcagacctgctgggcacatgccttagggtctctgcccttgtttttcttctactaagaacatctgcccctacatgtctgctcaggggtttcctcactttcttccggtctttactcagtaggctccttctgaaggaaggcttccctggtcacgccgcttacagttctggtcactctttccaacatcttattccccctcgcccactttatttatttatttttttcattagcagttaccactgcttgacatactgcaattttccttttttgatgtatttgttgtctatcttcctcacctggaagtgataagctccttgagtgcagggtgatttgtctgttctgctcagcgtgctctgcccagtgccctgaacaaggcctggcttggaggaggtattcagtcagggttgggcaaatgaatgactgaaattggccaatgtaggacctgagtgttagacttgaaaagaaaactaaagaaaggaaatacaggcctggctcggtggctcgtgcctataaactcagccctttgggaggctgaggtaggaggatcacttgagcccaggagttcaagaccagccagggaaacaaagggagaccccatccttacaaaaaattagctgggtgtggtggtgcatgtctgtggtcccagctacccaggaacatcacttgagcccagggaggtcgaggctacagcgagccgtgatcacaccactgcactccagcctgggtgagagtgagaccctgtaccctgtctcaaagaaaaaagcaaatatgaaaacaaatggaggccgggcatggtggctcacacctgtaatcccagcgctttgggaggctgaggtgggaggatcacctgggtcaggagttcaagactagcctggccaacatggtgaaaccctgtttctactaaaaatacaaaaattagccaggcatggtggcaggagcctgcgatcccagctactacaggaggctgaggcaggagaatcgcttgaaccttggaggtggaggttgtagtgagctgacattgcaaccactacactctagtttaaaaaaaaaaaaagaagaagaagaaacaaatggagaaaaagaaagtgcagggagctttttgggactgtggagctgaactaagctgtcttccatggataaggaaactgtatcttagaaaaggtcacttgacttccccaaggtttcacgtctggctggtgtgtagagcactaaagggtatacagatttcctggctctcagttcagggcctgttccatcagcaggtgcccttcaatttcactcccttttatccacttcaggcacccaaaacatgctagcataaaaaaacacaagaaacaaaaacacaccacatgtacacacccctacttaaatggacaacaaaagtcaccggaaaaaagggaaaaaaagaatgtctttttgatttgttttgttttgtttttgtttttggagacagagtctcactcagttgcccaggctggagtgcagtggcgcgatctcgatatccgctcactgcaagctccgcctcctgggttcaggccattctcctgcctcagcctcctgagtagctgggactactggtgccggccactacacccggctaatttttttgtatttttagtagaggcagggtttcactgtgttagccaggatggtctcgatctcctgacctcatcatgatccacccgcctcagcttcccaaagtgctgggattacaggcgtgagccaccgcacctggccaaaaaaaaaaagaatttcatgtagctgacactttcctctgcccctaataaatcatagattccttgccaatgagttctaaaggggctgtgtccactctgtttatacagtttatacctagcaggaatgtcagtttcaggtacaatttctagagtaatttctaattactgtaaaattcacagtacagcatagcagtttggatggccaatgtgctttgttttactgaatttttctgtgtgtgttattagcaatagtagatcagtctgaaagggggaaagaaatagtttgaagatagtagtggtcctgttacaacaaatacagattgattcctagctagcatatgttgcttcagtcaaagatgtctaaagcaagtatagtttccaagacacacaggtcaggaatagcagcatgtcccatggcaaaggtgatgctttccaggtatagatttgtctttgtgagaatccttgtagaattttctatataagtttgtttttgtcaatattgataaacatgatcttcaatgttcaaaggagagttcaattttagactaagagaagtacttctgttgtgtaaataaggttcaaaaataaggttactgttcaacttagagaaaatacaaacttaaaaataattcatttcattttttattcactctgaacttttaaaaaaagctggtttgtgattttcattttcagtaaaacaaatctcattactttaaaaaaaatgcttgtattagatattatatatatgaaatattatactttacattcttataaaacatttataaagaatgatgatacaacagatttgcatacctaagtgtaagacttgaacaaaagactaaagacaggaaatacaggcctggcttggtgactcatgcctataaagccagcactttgggaggctgaggtgggaggatcaaatacatcaaaaaagtaaaatatgtagtatgtcaagcagtggtaactgctaatgaaaaaaagtaaataaagtgggcaaagggtggaataaaatgttggaaagagtgaccagaattgtaagtggtgtgaccagggaagccttccttgagaaggaggctactagcctgaagagtttttaaaaacgtaaccattagtttggaaggtctctgtgttactcccattctgtcactcattctctccctgcacaaggaactaacatcttcccgacttgtatctattattctttgcttttctttataattttcccacatttatatccctaagtgatatacatttttgttttacgcgtttttaaacttgatatacatagaattatattctggaatcatctgtgacttggtgattttgctttgtgtttgtgagactcgtatgttgcatggaggtataattcatttatgctcagcaatgcaggatgctgtggtgttgataaactagcctgctactcatggataattgggtagtttccagtgttttgtgctgtaattctcactactacccgaagcattttggtacgtgggtatatgtgtactgatggcacatatgcaatcgtttctttcttttttttttgagacagagtctccctctgtcacccaggctggtgtgcagtagtgcagtcttggctcactccaacctccacctcctgggttcaagcaattcttctgtctcagcctcccaagtagctgggactacaggtgcatgccaccacactcagctactttttctatttttagtagagatggggtttcactgtgttggccaggctggtctcaaactcctgacctcaaatgatccacccacctcagcctcccaaagtgctgggattacagatgtgagccaccatgcccggccatatgcaatagtttctttagggttttgtgcattgagtatgcagtgaatgagttcactttgttccacatcttcacttggatcttcttaatttttgccagtgtgaatagtgccctcattgttgtttcaatttgctttatcctgatattaatgaagtagaacatcttttcttatttattggctatttctcttcatcagccatttggtttccacctctgagaagtacctcttatagctttttgtgtgtttctctatgacatgggactgcaaaaatacatgaatttagtatgtgaatgatacaaattaagtatatgtcatttggcttttcaataaggcaagagggttaggtgtggacttttatgactcattcttgtagggcccaggcctttggggcttagcgggtgttctcccggtgtgcggagacgagagattgtaataaataaagacacaagacaaagagataaagagaaagcagctgggcctgggggaccactgccatcaagatgcggagaccggtagtggccccgaacggctgggcgcgctgagtacaagaccagggggcagggtaaggagggtgaatcttctaagtgattgacaaggtgaagcaagtcacgtgatcgtagaacaggggggcccttccctcttaggtagccgaagctgagagagagaaggcagcatacgtcagcgttttcttctatgcacttataagaaagatcaaagactttaagacttttactatttcttctaccgctatctactacgagcttcaaagaggaaccaggagttacgggaggaacatgaaagtggacaaggagcgtgaccgttgaagcacagcatcacagggaggggtttaggactccagatgactgcgggcagactgggataatatccagcctcccacaagaagctggtggagcagagtgttccctgactcctccaaggaaaagagactccgtttcgcggtctgctaagtaatgggtgtcttcgcagacactggcattaccgcttgaccaaggtgccctcatgcgggcgtgacagagggctcacctcttgccttctaggtcacttctcacaatgtcccttcagcacctgaccctatgcccgccggttattcctaggttatattagtaatgcaacaaagagtaatattaaaagctaatgattcataatgtttataatgattgataatgtccatgatcatctctatatctaatttgtattatgactattcttattctaactattttctttaatatactgaaacagtttgtgccttcagtctcttgcctcggcacctagataatctttcacgcacacgttctgactatgagctatgaatggaagtgactgtcaatgactctgaaggttctgagatttatgctacttgctggctgacaaatcagcctgcgacatttcatagatgctgatagaaaacatgagactccaggatcagagatgaaggacagtttattacagcagcagcagtggtcaggataccattgtctttgtaccatttccctgaacccagattcctctagggcaatgcaaagagacatgatacctgcacacataatgggttgcattataggagaggagctctgagtttagagaacctgagtctttttatactgtgcagtaatcgcacctgccctttgatctggagggagacactctaccaaggccatttactgtacaagcatctttgaaaaggtagttcagagcaaagaacaatcagtgtcttgctcacaagaagtggaaaaatgcaagagacctgggggtgaattgtctcctggtagtgatgtgtgtcacttttggtcagagatagctaagagcaagtgtgagccctctagtccctgccatgccccccttggaggttgtgtgtgacgctgatgctcctgtcagcatgagttccttctgaagagtggcagtgagcactgctacttgcaagctgtagtagactgggatctcagtgttgacttattgctaatgcgtagcccagcttatcctgatacatagtctgggaacatgaaggaccaccttctgtttatagaaccccatgtctgcttatagatttcagattttatagagattcattaggtttattctgtctactttcagtcctttcgcttataaactttcaatccaagcataaggtctttttcctgttacgctgtttgaactttgtttaaaaattgtggccaagcatggtggctcatgcctgtaatcccagctactcaggaggattgcttgagcccaggagttcaagaccagcctgggcaacagtgggaccccatctctacacacacacacacacacacacacacacacacacacacacacacacacacagtgggaccccatctctacacacacacacacacacacacacacgcacatatacacacagtgggaccccatctctgcgcgcacacacacacacacatacacacacacacacacacacacacacacacacacacacacacacactagcggagtatggtgacgcccacctatagacccaggtactcagaaggctaaggagtaaagatggcttgagcccaagagttcaaggctatagtgaggtatgattactccacttcactccagcctggggaacagagtgagaccccacctcaaaaaaatcaaaaaagcgaagatttaaaaattaaaataagattgttagccagttttttgtttaatgaaggaaaagttttccaaattaacagaatgggacattcagataaaatttgtgcctttatgacccaggaggatggcctgggtgtacatacaagtactcaggacaccacattctcacctttggtatctatccgttttattactctgccactcccaaacagtaatacataggattccgtgttagtttcctagggctgatgcaacagattagcacaaaccgggtggcttaaaataacagaaatgtgttccttcacagttctgggagccaggaatctaaaatcaaggtgtgggcagggttggcgcctccctagaggctcttagggagggtctgttctgtgcctctctcctggcttctagtagctcctggcagtccttgccttccttggcttgtggctatgtaattccagggtcttctgctgctgtcacatggccttcttccctatgactgtgtgtgttcattcacataaatccagcaccaccagtcatcagatttaaggctcaccctaatccagtgaaacctcatttaactcattatgtctgcaaagaccctatttccaaataaggtcacattctgaggttctgagtagatatgaattttgggatgacactattcaacccagtatgctatatagatctgaaagcctacttgacacacatgtaaagctaaaaagtgactgaggcaacttacctgaaaatatattttacaaacagagcattacttcttaggtctcatttgagtactaccatttatttccctagtattttcatacatcacctgtatgactgcagttcgtaccccatactcaaaaatgcaggaacactgatgatggctatgcctaattttcagaagacaaaagtgagcatagaaaggttaaaataactatcctatggtaataactggtagaaacaggatgcaaaaccagccctcaccaactttgaagtcaggctgttgaacatcagaggaccttgagaacaaattgcttgactgtggaatccagggagctctctgcagtaactgctaagtacaactgctcaggctgccataatgaaacaccattgaccgggtggcttaaacaacagatgtttatttctcacagttctagagcctgggaagtctaagtaaggtgccagcagattcagttcctggtgagggccctcttcctaggctgcaggcaaatgcctattctcccgtagcagagagagagtgcaaactctgatcttccttcctgttaagggcgctaatcccatcatggggccccaccctcatgacctcctctaatgaactctgaaaggctgcgtctccaaatactgtcacattgagggttaggcattcagcatatgaatttggacgttcagtccctaacatacatttggttggtaagctgcagatcccagaatttttccaggatatctgtgcccatttcaaattgcaaattgtctgggttttgtttgttttgtttgcatgttttggtgaagctgtgagtctgtgtacatcagatagtgtaagctcacaaagaaatcgaagagagctggtgttttacttaaccagaattccttacttgaactgtgcttcacaataagaataaatattttgttattaaagaatgcagaagttaccattttattgcaaatttttattataattaggttttaaagtactataataaggcaaacatatctcagtgagactgactttttttcccttataaaaacaatgtttgtatgaaagagaaaataagcttagactccattgaacagcttcttcatggctgcagtattggcattcacccaaggactcttgagaaacgatcaaattttcagtatctttgaagcttagccagagatctaatgaaaccaaatgatgctaaagttcttaaagctaatttaaatctcaaattatacattttaaattaagtttttattgataataaatatactttatttcatattacccttgaaagcttgagtgataatattagtagaataaacatgttttacaaagatttaccattaagaatgctattaatatgacccttgatacaccagcacaattagatttcaaagtaagcacttatgaagtaacagcgattaatgacaaccatcgaaaacaattttgaactccatcagtttaactcaggagggtaaacttaatatgataattcatctagttgaattgtatcagcttagcaggaaggtatgtaaatatgtgacccttacctagcttctaaatggatgctgtgctgatagatttatcagttccattaaagaactttggggaactttggagtttcagcaattgttcccttggaggctgaaaacccaacctgatctcatactgggaccattctggtctgcatatttccataatttgcctttgctactaatatgacagcaagacacaaataactgtttctaataatatcagatggagttgtggaggacagcattttaatgtagtaaaagacctccccgtggggttgttattgctactatagaacagcagctacacagttgcaactgtagtctcttaattgattcgtttaattagcaagagctgaagcttgggctgtatcttgtcatctgatatcataggactcgaaatttgcatcattcatatttatagatatgtaaacatcatcaaaaaggtcttctgcttctgaaaattcacttacagatatcaaattttaatagagcagactcccatttgtttgaaatttaactaattaaaaaatgaaaagaattaagtttgttactgtttttctttatctgtactcttgagaaataagtgatgtcatacatttttggttgtggatcatctcctaaacataaacttccagagaacttcttcagtcttccgtatctcataattccataagcagtccctcaactgacatgtctgacttaagttgatctctcctctctgtcccatccctttctctgtgtcagtgtgatttcaggaatgacatgatggcttactggggtttcttgcacacgtgtgctgtaactttccacctgtccctgcctgcctttgcagctgctccaagtcctgctagggtaggctgtctgcttgtgctgtggtttggtgggtcatctggctgagttggctcttggcagttacctgcctacccaagctgcattggtccccactttctctggaggggaaaagagaaacggatagaaagtatctggcatagaaaccagagcctttctagtctgtttaccctcaactccacagggcttcctccctgctcggtcacactctttgtattcctgacccttttctagtccaacaataggaagcaggtggcggtcacagagcagacactttgtggaggggtgatgaagttttctgatgttcagatatattttacagtgctaagaaaatctatagcattccttcctgcatttgcccctaaatatacaaaatttcaggcaaaatatgggtagaataagattttatgaaatggaatataaatgtagtcttaatcttgaacattgtttctgtggtaatgtgtgttctgtgtgccatgtaaccaagctaagaatgaacttttggaatataactacgtttttattcttttgaaattggcatgctctatataatataaaagtttggttattagtattgcagtgtgatgcattctgaacaaaaatttaaaagaaatcattgcctgcctgctatactatgtgctaggaagtgggttagttgaacatgacttggtccctacccttaagtagcacactggctggtgaagacagacaaactgataccatgcaaacatggtatcagtgctgagatgggtaatgcataggcttatatagtagcagagcgaattgtagatctgttagctttattatttgtttcttttattgataaacagtacagtccatagggcgtaggtctctggttaagaatttgcattttatttgtcaagtacacctcaataaacacagggaaaagaagaactgtatttcatatcttattagacattactttttgaaaatgagcacaaaacctagcatttaatggtagtcatgagagtcagtcagtcatcttacactggtgacagacactgaattctggcaattcaaaggaaacaaatatccctgcagtcattgggcccattgtcacctaaggatagagaaatgtaaatgactgattaccgtgataagaacgctaacagaggtgtatacgaagtagagggattctggggctgaggtgaagaaagtggagaaattgtgaacagtttttcagtgtttatagctcatgctgtgactttaaggatgaattgagtttgcaggagaaggcatttcagatagagggaacagtgagcctggagatagcaggttgtagaaactgcactctgtactgatgatggagaaagaggacggaatgaaattaataaaggcgcagaggtattaagatgtcccaagtgtttaaggaagagcagattggcttatgagggtgatgggcagggcaacaaagatccctttggaagatgaaattagtctgttgggggcaagatgacacaagaccattccaaggaggttgggtggcattccctagattctgaggttcattgaaggagttgaaagaagaatcataatctcatcagaggtggttggttttattggtgtggtttttttttttttttttttttttgacaacttatgggagtaggcaaagaaagaagagggtacatttgagagccacttctttagaatccagtgtacaattctatgtattgggcagaattgaagataattctgagatttctagaggtgataactgatgcagttagggaggaaaaacaggaagaagagaagaattgtaccagagaaaaggtggactctattaaaaagatggatttaaccaatttaagtttgaaatgccaagagacatctatgatataagggaaatttctggtctggagagcaagaagaagattaagagtgagcacgtaagttgatgccccagcagaggtgaggtcctaagccatgcagtagatgaacctgccaaagggacaatggcaaagcagaggccaggcccagaatggagctccaggaaatgcccacagctaaggtggaggcttgtcctctctaatggagtcacttacaaaatgatgacatgtttattattgaaatcatttatatatactattagaagccagttcattgtaacctcagttatgatttcacagtatcctagggtatcactaagttatttcaaagtatctcaggatctgttgccacctgccaaagatcttcaaagtaaaattaatatttataaataatgccttacgcgtgtatggtgctttagggctttagaatgattctacatatgtcagcttacttgattccattcaattgctaagatgaataagccatagcacaccttagagtgagtggtaaaaattagacatggaatacttcttgcagtgttttccatttaaaatatttgagattacaagttatgtgttcacaggaaattaccacgaaccactgccagattgctagtgaacaggatcgggcaggggtgggggaggaataagtagagtttgtcttcctgcatttgaatcgcagatcacctgtctcttagctttgtgaatttgaacaggttgcctaacctccctggtcctcaattttttcatcaacagaatagatattatctgcttttatggagatggcaagggctgaaaaagaaaacgtttgtaaaatgcctgaaaatagcaggcacttggcaaagaatagctcggtttttattgtagctccccactctccctttgcttcattttccctttcatttgtcttgcttggagacatgctatcatctgaagtgatagtctccaccgagtcttcaatttggtgcttggcctacagaaaaatccagagggaaaatattgttcccttttatttgaaaaaccaaatttgtgttaatcccctggttatgaccccttaacatagttaatgttttgtaagtgaatatggaatagaaagcacatacttaaatgtgtaccttgtggtggcagggtgcttaaaaacatctgtttccttgaagaatcttgcgaatcaccaacaccaaacttgaccagggaagaatttggtgccttgtgtttaaactgtgctgcttaaaatatattcagatggaaagaatggcaaaaccattctgatataggacattttatgacagtgcctatgagatgttctttcttctactggcctcacttttaaagggatatcattttaggtaggctgtttcagggcactgtcatatgttactgtggactatcgatctcttgtacctatgaattatttgattgtcactctttaatttatagtgagaaggaagtgggaatggcagctcttctcttatagaagaaaaatctgagtcagtggttctcaagttttatcatgcctgaggatgaccaggaaatcctggtgaaaatacagattcccagatctgttcctagaaaagctgaccccccatgtctgatgtcgaaatcggcttaaaatgcaccaggactagaatttgcaatatattttgaacattaatgtagaattactatctagtttggaaagtcaataccaaaagacacatgatattcctggccccatgagccaagcttaggagcagtgttctggatccttttcagaatgagaagataggacaaacatttgattatttgtgctaattaacatgtactttcataatacatacttttttaaaatcagggagtgacatgataggatctaaagtataattaggtccatagtgtcatcaactgtatcttttaagtttacttatcatctgtataattctttagattcagtctgagttatttcaagtcttatagacagtgataatttttatttttgccctagagcagggcagtgttatctgtttgggcagtattaacattttggacaattctctgttgtgggagactgccctatgcgtaataggatgtttagcagcatccttggcgtccaccaactagatgtcagaacatgtctccagatataacaactaaaattgtctccaaatattgccaaatggctgcacacagcttggttggggagagactccagaacagatgtgaaacttagtggctggaagcttacaaagtacacatgtcatgacctacttgaataccttatgcgaagaaaataaactttacccgtcctgatactggatttgctttaggaacatgtttagcgaatagctgtttggaagtgtgtaaggggtactttttctttatcttcctcatattggatcatgaaccaggtctaccatggacagccattcatggaatttagggcaaagtctagtttgtgtgattgcattgtgttcatttgggttctttttaccatttgagtagatgtactgttactgcttaccaaagacacattttgggtatacagtgcgtgtgcagctcaataccttattctagaagctgctgctcttcattttgtcttcagttttgtaaaagccccgtaatcctgctggtgagacatattagagtgtgataagcatcacttcacagtgacatctgtgaagttcttctgttctttttgcagctactatttaattgtttggctatttaatattttgtggcgcttccccccttgtgcaaggaagtatatggcaggatgcctgacaagacacgtaggaagccacacagtagtcagcatctcaagtgtgtgttcctgagaaatagccttcccaagccggcatatgttttgtatggtgtaaattctcaagattgtgaggggaacagctaaggtaattcctaaggtatccgtgttaattacctaaggtaattaccaagcatcagggaacatagcaacactgcaaagtcaaagtaccctcgtttgaaatagaatctctacctgatttaggggttagggaaagaattagtggataggttctaacaattacccttctgaggtcacgagtttgagaccagcctggccaacatggtgaaaccccatctctactaaaaatacaaaaattagctgggtgtggtggtttgtgcctgtagttccagctacttgggaggctgaggcaggagaattgcatgaacccaggaggcgggggttgcagtgagctgagattgcgccactgcactccagcctgggcgatagagggacagtccgtctcaaaaaacaaaacaaaacaaaacaaacacagttacctttacagttcaccatggccaaaagattgtaccactcctttcctgtctcagccactttttgagtgactgtaaagtaggttggccgggggacgatcgttgcttgctgagtgcctgtaggtacctagcaccgtatgtttgtcattctcattgaagtctcccctttgagatcaccagtagaatccccatgtttcagatgcagtaacacggacaggaagtaagggatttgctcagagtggtttatatcagaagagcagctgtaggaccaaacccagatctagtaacaaatgtggcttccttcacatgagcatctgggtggttgggagttagttattcctgactgttgggtggagagcaatttgatgggacaaaaccagttcttctgtgttgaggcttagacaccagccacttaacgggccagacagctgaggtccggatttctctgcttcctgagccagttactcttgtatagcgggggaggagtgggcacattctttttttgagatggagtcttgctctgttgcccaggctggagtgcagtggcacagtctcccctcactgcaagctctgcctcccgggttcaagctattcttctgcccagcctcttgagtagctgggactacaggtgcccgccaccattccagactaattttttgtatttttagtagacacggggtttcaccctgttagccaggatcgtcttgatctcctgacctcatgatccacccgccttggcctcccaaagtgctgggattacaggcgtgagccaccgcgcctggcatcaagtttgattgtgagagtgcagcaattcagtcacatgtccaagctccactcctagttcttttgctgttttccctacatctgcagttacttcttgaacccctcaaagtcacccatgagggttagaatccagttcttcaaactcttgttcatgttgataatttggcctcttcccatgtgaattcaacacaaatgttcttaatagcatctagagtggtgaagaaggttttcaatttactttgcccagatccatcagaggaaacactgtggcagctgtagtcttccaaatgtatttctgaaataataagacttaaaagctgaaacgactgcttgatccatgggctgcggaatggatgtcgtgttagcaggcacaaaaaccacattcatctccttgtatatctccgtcagagctcccaggtaacaaggtgcattgtcaatgagtagtaatatttttaaggaaatatttttttctgagcagtaggtctccacagcaggttttaaatattcagtaaaccatgccctaaacagatgtgctgtcatccaggctttgtttttgcgtcctagagtacaggtagggtagacttagcatcattcctaagggccctgggattttcagaatggtaagtgagcactggcttcaactaaaagtcagcagttgcattagcccttagcaagagagttggcctgtcctttgaagccagaggtttacttctcctctctagttgtgaaagttagatgacatcttcttccaacagaaggctgttttgtctacactgaaaatctgtagtttagtgtggccaccttcatcggtgatcttaactagaccttctgcgtgacttactgcagcttcttcatcagcacttggtactttgccttgcacttttatattatggagatagtttctttaaacctcatgaatcaacttctgctagcttcacacttttcttttgcagcttcctcgcctctctcatcctgtgtagaattgaagagagctagggccttgctctggagtaggctttggcttaagtgaatgttgtggctggtttgattgtctatggagaccactaaaacttaggctgggcacagtggttcacacctataatcccagcactttgggaggccgagaggggcggatcacttgaggtcaggagttcgagaccagcctggccaacatggtgaaactccatctctactaaaaatacaaaaattgagctgcaacaatagaaagatggtggagcaagaacaaagaaacaatccctttgactgggcgcggtggttcatgcctgtaatctcagcactttgggaggctgaggcgggtggatcacctgaggtcgggagttcgagagcagcctgaccaacatggagaaaccccgtctctactaaaaatacaaaactagccggacgtggtggcacattcctgtaatcccagctactagggaggctgaggcaggagaatcgcttgaacccaggagacggaggttgtggtgagcaaagattgcgccattgcactccagcctgggcaacaagagtgaaactccgtctcaaaaaaaaaaaaaaaagaatccctttggttccagaaaatctcctgaaaaagaggaaggcttattaagccttcagagctacccaggcaaagcaggtacttttggcaaagaggaacaaaggaaaggaaaagggctcaggtttaagggactggaatcctacatgattcctggcggcagaaacatgacaaggtgggtctcagacgactagaagtgaaacctcatgctttggaattgccagataaacattccttggcctttcttgtacgtatcaaaaggattgatggtgtggccgggcacggtggctcatgcttctaatatcagcactttgggaggccgaggcgggcggatcacaaggtgaagagttcaagaccagcctggccaacacagtgaaaccccatctctactaaaaatacagtattagctgggcgtggtggcaggcgcctgtagtctcagctactcactcgggaggttgaggcaggagaatcgcttgaaacccggaggctgaggttgcagtaagccgagatctcaccactgcactccagcctgggcgacagagttaggctctgtctcaaaaaaaaacaaacaaaacaaaacaaaacaaaaaaagtttgatggcgtgtgagtttactggtgcagaaaaccattgcaagattttgcctaaagaaagtttttagtggtgtctttgtaaaagtcaccccctgctgcatgtaatgggatcttatgtgacctggggatttccaaatctgaattttctctgggaactgattttgaaacgtggtcaaggtcaagaataagaccatccctctgacagacaacacagtggttgcggagcacctggggaagtatttccaggagacttcatggttcttgcgtcgtttccacctctcagtggcccatcatgctaccaaaaatagagtgggcttcctcgagatgggcacacctggctatcggggtgaacacgtcaatcagctcatccgccagctgaactagacccaggtgccaaactgcagtacatttttatcagtgaagtggaagcgtgtgttttgggtttttttggggaatttttatcaagtatcttcagagaagattatttcctgcttaatcttcaaaaactggaaaggaagggtcaaagaaaagacagtagcttatgtttatggcgggcacctctcatcacagtcattcccaaggaaaaattccagagttttctacattggcagctgcctcgtctaaatcaacacattccatgtgcatcttctatccttgggtttaatgttgctaaatgagtaactctagcatttgtacaagaccccctaagactctggcagcagtcgaccaagcccagggacataattgaatctggagattcctgaggccttgttttgaaaaagacttgaaatacacataggaagaaaggcccaaaaataaatgttcacttgtctctgcaaaaaaataaaaataaaaaataaaattaaattaaaaaataaaaatatgaaaactagctgggcatggtggcttacgcttgtagtcccagccactctactcgggaggctgaggcgggagaatcgcttgaacccgggaggcggaggttgcagtgagccaaggtcacaacactgcactccagcctgggcgacagagtgagactctgtctcaaaaaataaaaataaaaaaacttttcatatcagcaacaaggctatttcactttcctatcatccatgtgttcactggagcagcacttttaattttcttcaagacatttttcctttgcatttacaacttgagtaactgcacaagagacctagcttttggcctgtttcagctttccacatgctttctcagtaagcttaatcatttctagcttttgatttaaagtgagagacatgtgactcttcctttcacttgaacacttagaggccactgtagggttattaattggcttaatttcaatactgttgtgtcttggggaatagggaggcccaaggagagggagagagatgggggattggccagatagtggagcagtcagaacacacacaacgtttattatagtttaccatcgtacatgggcacagtttgtggttccccaaaacaatttcaatggtaacatcaaagatcagcgatgacagatcaccacaacagataacgacgaaaatgggtttcctaataatgcagaggtttgaaatactgcaagaattaccaaaatgagacacacagatgtgaagtaagcacatgctgttggaaaaaatggtggcaatagataaagggttgccacaaacctttaaattgtaaaaagtgcattatccttgaaacacaatagagtgaagcctaataaaatgaggtaggcctggattttttggatacttgatagtatctaagtttcttctcaaacacagcaaacatttcacagttcaaatttgcccatcggtagagttttctctgtggatcttctctgttaatgccacatctgtctagagtaaaagttcaattcaatattgtgctatcaacttagcaacttgttgaagatgaactaacataagtacatgctgtgtgtgtgttctgtgtgcagacacaacacaggtgagctttccgtaagcctggatcttcccaatggcggtgcttctcgtgtgcaggccaactagggagaaggggacactggggcccacccggagctctgtgggccttgtctcttgtgacaaggatattttgctccttagctcagcagagtccaggttcttgtctcaggactgggaagaagtaggcaggcggacacttggagagtgagtggagtagaatgcactaagggaaaggaaaacttaaaggaagggtcttgaaagcagattgtggttctcccttcacagtggaatacaagggcttttatatacctgctgatggggctgcgttccctatttctgtaagcgcgaattcctggcggctccacccgtccttccaatgcagacgtgggcccttagtctgagccactctacattgatttatttcccttactgcgcatgtgttaagggacagaacttttccaccgcaagcatgtttgggcaaggtccctgggcacgacgaccttggtgggtcagaggttctccggggaccctcccctgtctaccggggagagttctctgcttcctgcctccatctactccccagtctgcagtctggccctcggtggtcctgcagatctggtgttgattttgcagggtgtttggaaaggtacctgcgtattttcatttatggaagtgactgagtgccgacgaggagaggttaatgcccttgagaggagaatttattacttcatcacctaagagaagggggcacacccctccatgcagggcacaggggaaccaccagtgtgggtcaggaggcagaaaggagccagagaaaagtgtgggtgggaaccttagtggggcttcctcgggaaaggcagtgcgtggctggtttgaataatgatggtgggctttggggtggtctctatttgcctggtatctggccctgggatgttttaaggcagggaaaatactggcttggtgtgtgttagagaaaatgggcagctggcttacttccaagttctttactaaattgaggaattagctggtcttgggagaggcagtgtctttctgggtctgtaagtccctggaaaatgttaaagtatcataagataaaaaaaaaaaaaatttaaacctgattaatacactgtgaacctagaagtaaccagattttaggaaactgacctatagtgagcaaactcacagggattgatagctaagccagaatatgcatttattagcttgaggggaggaatgtttcttccagtgaccaaatctttaagtctgccctccagaatattgactaaatattctgccatctagaatggaataattaggaaactcattagtcaccttaatttcaaactagtttggtttatgtggtaatcagagcaaacggtgacgtggtgtacctgtgccgcgcagggacttggtgaattaatctcttctcccagaacgccccacaagggccaccgccgtgccttcccttttctttgcctctgcgctgctgttatcttcccacagaaaggccccctgcagtcgattaggcttcagctacctaaacaataggcacagacccaaacgatgtcaaactacagttttctcctgcccttagggtggcactcaggccactttgattggaattttgagtgtccccaaactctggttgtactctttcacagatgggcaattacagtactgctctgtggagttttaccagtatagctctcagaaattcctaagaattttctatttcttaggttacactctctatagtacatacactcagacagaaaaatatatttcacgaagagagccttgaaaaatctcatctctagtcccagtgatgccttaaactggttgtgtgaccttcgtaaacctcagttttctttgttgtaaaatgaaaggtcggggtcggtgacctctagagtctatcccacccctagcctgctccgagagtgattgcatttggcacaatatgcagtttgcttcgcagcagtagcaaaatgacacatgcaacttattatcatcattgtctatcttttgatttccttgagttttccagtctcattaggggagacatctctggcttatcgcacaatgacatcgtgtcttgtaacttaatttctggggacaacacattgtgctgccacaggcacagtgctaataatcaaggttgtctgttctgcttactgtgacttttttgtggtttctggagaaaaaatgcagatgcttttcaattattctaagggaattttgatgaaccccctgggtagagttccctgtgccacctgccatgagaagtgagttttatcgaacagaaggtagggaattgaattgctcatatttgttttctttctggtacctatagtattatttcaagctcaagcattttaataaatatttaataaatacctgtctaaaataggccaaaactgtcataaactaaacctcttttcttcttcaattttaaatgcaaatgagttaatttgacttttagtggaatttccaagataaaggcccatgtttttcctttatgtatccgaaagttatttttgatggtatagtgaacgtcctgcttactacacattttatgtattagcctttggaagcaaattccttaagtttattgcaacgttgctgcttttgttgccattcttataattttatgtatttactgtttctctctctctctctctctctctctctctgtctctgtctctgtctctgtctctctctcatattgagacaggatctcactctgtggcccaggctggagtgcagtggtacagtcatggctcactgcagcctcgacctcctgggctcaagtgatgctcccacctcagcttcccaggtagctgggactacaggaatgcgccaccatgcctggttaattttttaggtattttttgtagagaagggattttaccacgttgcccaggctggtctcgaactcctagtctcaagcgatcctcccaccttggcctcccaaagtgctaggtgtgagccactgtgcctggccgtatatgtccattttgcaggccagaattctttgactgtttgatttacagagaattttcaaatatctgcctctaaggacttttgtagcaattttattgagatacaattaacgtataattcacccacttaaaatgtaggatccagtgggttttgtttcttgtttttgttgtttcttttgttaagagataagcagcaaatacatttttagtataattatgtttcattcaatatttgggacatatgctaacacttgttattattagcattattattagcattattattcaagctgaggtctcattctgttgcccaggctggagtgcagtggcttggtcacagctcattgcagccttgaactcttgggctcaagtggtcctcctgcttcagcctcccaagtaagtgggattataggtgcaagccacagcacccagcgattcactggtttttagactgtccacagagctgtgctgccatcactgtaatattttaaaacattttcatcaccccaaaaagaagccccctacccattagcattcactcctcaccccttccacccctcccgcctgtggtagccactgatctactttctgtctgtgtatagcttattctggacatttcttaggaaaggaatcatacagtatgtcgtcttttgtggctttcacttacatactggtatccacattgtagcacatgccagtacatcattcctgtgtatgggcaaataacatcccattgtatggatataccttaacattttatttacctgtcagttggtgggtgttggttcctgtcttttcggctactgtgaataatgctgttatgaacattcatgtacgagtttttggggcgacaaggttttaatttttcttgggtgtatacctagaagtggaatttccaggtggtgtagtaactctatgtttaactttatgaggaattctcacactgttttccaaagtggctgcaccattttaccctcccaccagcaatgggagcgatccagttcttcccacatcctcactgacactcgttattgtcttttttattatggtcatcatagtggctatgaagacaggcttgtttttaaatattctctatgtagtattctgctttcttccctagaaatcataattaatgcagaagtagcccaaattgtgtatgttaatttgttttatttttttaaaacaaacttgaccccccaaaagcaacaaagcacatacatttcagttaatatatattttctaggacgttattgtctcttctcaaatgagatgatttcgatatgaagcacagagttcctttcattttcctatgctcattctctctctttttaatggtatcacatactgtgcaggaaggtcattatataaggagaggaaaaaagaataatcagcatagaagagaaaattaatgctgtttgtgtaatttttaataggaatgttgtaaaattttgagatttaaaccaactactaatattttttatacattactgggcagtttcctcttgttgcctgtgaactgatactttgccttggaaactcagatagtaaaaatatttgtcaaagcttcaaataccagtgttttaattccttagtcatttagatattaatcctgttctggagaccacctacatgtgtttgtaagggatgtgataactgacactgtatttaattagcactaatattgtgaaaaaagcaaaacatattaagtatctttccaagtcactagtttgaaattagcagaagtgaggaagagaaagtcctgtccaccccccacccttagtttgcatacccatggaagtttgtgatccatttactcattcatttatccaagtatttgataggtacatattttgtggtggacaacattccaggtattgtggaaatggaccaatttcaataggacagaaatctgaatcacaaataagcatccagtggcaaccagctggtgtacacactgcacctaaatacaaattcataggtatcaaaatcaccttcatgtgtcacacagtcacctttcttagttcctcatagcaaaactgggggactctgaggtcagtccccagagtacctggttgaggggtggggcagggcagttgaataagggagtagaatgaatgaaaactttagactctgaagctcgtcactttattctgccatattttagttttgtggtattaaatctctacagaaattaattatcttgcttcctttcttgaattccttttcaaatgttatagttactacttcagtaattctatcccatctgtttatatacaaaaggtaatttaccgggtaatgaccgagggcacctgctttaaagtcaagtgcatactaatttactggctatttgcttggcctcatttacgctctctcggcacagtttctgggtctgtaaaatgagagtgattgtaccatctacctcattggcgacagtgagaattaaatgagttggtgcatgcataacacttagtacagttcctggcacaatgttaccactcaataactagcagtgtggaaatatttcacacctaagagtaaagttttatttacctttaggagacaggatcctgggaactttctggttgccatagctgcttcctcaaggcaactaagttagatgtggagtttctaattcctgttggaaattcagtgaataagaaaatactactgaaagttatactattttctgcatgttaatgatttgatattatacagctttaagttctcagtgctcattcgggtagtgcaggtgagagacggcggctttaggggcaaggcagtgaccctgtggatgatgggaagagagttgttaagaaataattgtttaaatcatccagagagtactgtagcaaggattgttcctaaaaagaactgtggtaatccttgttgaatagcaagtttggacagtatacggtagggaaatctcaggaatactataaacaaataaaatgatggggtgagccctatgaagcgtgtgttctcctgtgggcagtggcagagttacccttcacccctgagtcctgatttctcagcctcttcatgtgactgtctccttggctcctgggaaagaaagaagcctctaccttccctggattgaatgcagcccttcttgtcccgtctgcagagcatgaggaacagctggccacctgcacctgacaaggcctgtggccgcgggcagtacccagccctgcgctgacggccgctccaggttgttgctggatgtggcgagctcgagctaatcgggccttttaggcttttgtttcttagcaaatgatcagctgtgaactgcccttggcctaacttggccttgttagctcagaagcccgcaattcattgcattttaccctgaagaggaatggtaggtctgaggacatatttatttttctgtggattttttttccccttgatccaggaaattgtctgtcttcaacaacctagtcttgtctcctccagagaaaagttttgaatcctctgaggagcggtctgtcgccattgtggcctgtggtcagtgggtcagaccagagccctgacaactgtctcccttcctgggcccaagtggacaccagaggagtttggggctctgggatcagcctgctctggcgagtgtcctttccctcccactctggaactgtagcttctcagccctcttcttgatgctgggcgggtgcctgggaggccccaccccttccctgggtacctggggaggtccccgactgagaggtgggaagacctgtgtcccctcccccagcacactctcagcctctgacttagttctcataggaggaggcaacagcttccaggagctgctgctgttaccctcgacgccatgatgaggaggaaattgcctggtcaggagggctcgcctgcctcttcacagccaggcgtactgtagcggcctcaggagcggtcaccctgggagtgactcctcacctcctaagcagccctggggcatgaacactcgtcctggaaatcctgctaggctggcttaagggagttgcttctagcatgcctttctggataagcctagtagaattgctttttctactataaaaaggaaagaatggggctcctcatattatagtaacagaattcttggtactagaactggtaagccaagagaaatggaagctgaccaacttttctctctgcacagggttcagagggatagaaacacacaatttgactctgcatgcaccagaaccttctcactcagggtaagggacagccacagtttctgggacgttacctaaaaacacaataatcccacttattctctgacagataatcatcagtcatagccccactactcacttttattaaagaaatagctgggcccttttaggtaaagccctttatatactgggaaaaaaggtcatgttatccattcctcaaatcccaggtaaactcctgctggttactcaaaaataaaaaccaaaatgaaagcccattcatcacagggatgcctaatcttgtaatgagggaatcactgagtgtggcacagggaagactcctgagagattctgatggggtacaagtgtgctgaccaacgtcctagatacagtgggcccttgaacaatatgggggctagggatatcaaccctgtgcagtcagaaatctacggataccttctgactctcccagaatgtaactgctagtagcctactgctgaccagaagtcctaccaataacatacagtcatttagcacgtatttggtatgttacatgattatatactgtattcctgcaataaagtaagctagagaaagtgttaggaaaatcataacgacaaaatatatttattattcattaagtggaagtggatcatcttaaagatcttgatcttcattgtcttcacgttgagttggctgaggaggagggggcttgatcttgctgtctcaagagcagcggagtcataagaaaatgcacatttaagtggccccatgcagttcaaatccatgttgctcaaggctcaactgtacaccgaactgaaaaatgattccatttttagtaggaaatggcctactctaagtcctactgcttccctttgcacttgatggcaagggtctttaactgtgtcagtggagctggtttggctccactgatagagactccctgaccatctgataggccacttttgttagaggagaaggtacccccttgcctacctgttcttttcttacttcatgggtcttgattcctgactcaggagcacccattacagaaaagccctgggactagatctaattttatttaatgaaaaacctatggagcatttactcttgcttctaataaattaacaagtcagggctttcttctgaataggagggtctcttgactctttgatatttgacttttgaaccagactagatgaggcagagcttcagcacatattttaccagtgtcttcagcaaatgcctttctctttgcaaagctccatattactaccaaaaattaacccaactaaattgtaatttctactcacccacatttattgagtactgtgtttccttgaaagatctcaaacaaggcaccttcttgcaagatcttcaccaccagaccttcatgatagtcacctcctcattaggctgagacgcatacacagtgattacgttcagacacagggactcctgtgtcttaagaccttgtgtgacccttgtaattaaagcattacactttgcaaaggctgacagtggtataggggctgtctgaaactattcagccatagcctggtctctgctttctttttacaaatgggaggttggctaaggcagacacagggatggctaagagggataaaggacgtgacttccatagaaccttttgttcctagaggaacctctccatgaaacacacagtgaaactagattaaaccaaaaaacgccctcagctccagcagatcctgagctacaaagcacctcttccctaccgagccttctcacccatgcgcactgagtttctgagtatcagaaagtcaggtttctgaatccctagagaaagtaaaaatttccttggacacaatgggttttctttgcttcctgcatgacagtcacgaaggggaatctgaaatagagaacttgaatatgcggcttgctgaagggaagtgtactgtacagtagccccccttctccacgggggatccatgtcaaaatccccaggggatgcctaagactgcggatgggaccgaaccctgtatacgcttgcctttaatgccttttccatttcagctcggcacttagcccacactgtggctgtaacttttgtagttttaggtacagcagcaaaactagcacaaatttctttgtcctttttcacaatttcatggatagaagattgattcttactgtagatcttagcaatctcagcatacttttttttttcttgagaactttcaccttttaactaaaggaaggacttcatggctggtttttggcatatccagattgccagcatcatactcttggaactttgaggccattgtgaagtcaaataatagttcctgccaggcacagtggctcacacctgtaatcccagcattttgggagtccaaggcaggtggatcacttgagctcgggagtttgagactagcctgggcaacatggcaaaactctgcctctacaaaaaacacaaaaattcaccggtcacggtggcacatacctgtagtcccagctactcggcaggctgaggtgggagcatggcttaagcccaggaggtggaggttacagcgagccaagatcatgccactgcactccagcctgggcgacagagccagcctctgtctcaaaaataaaaaaggaacctaagcactgagaccccctgacagtagatctggtaactgagatggccactaagtgactggttggtggtgggggtgtctacagcgtggagatgctggaccccgagagagagggtttatgacccaggcaggatggagcaggacagcacaagatctcctcacactactcagaatgactcacaatttaaaacttatacattgtttatttctggaattttccatataatgtttctggaccatggttgaccacaggtaaatgaaaccttggaaagctaaaaccttggataaggggggactactgtaatataaagtttacagttcctggggtgaaagctcaggcagaccctatctatgcattattacaacgtaccatcaattcaaaaccataaatttgcagaaacatcgttgctttaattcctaaaatattgaatatgaataataaaaataatatatgctttgtcttagaagcacctttttaatatgattgatgtgtattgatctgtttcttcattctaacatgaacatttctgtaacagtcatttcccctgaaatatctaacctgtgggtacctgagacagcttgtcagttaggaagaacagtggtggcgatagccacgtagggctggtttggtcgtgagtgcaagtgtggttgcagcagctagagcagaggactgtgtggagaacatgggtcaggtcagaaggcagtagccaggagggatgcagagtcgagagagaatttgttgattggaatgactcaggttgactttcaggatgaagagaaggggccaatagagagggaagagaggacagttgatgaggcaggctccaagagaggagggcaaagcgagatcaggggctccagtgaaatgcctgagtgtgatgagaagagcgctgtcttgtgaggctagagagggaaccaaggatgggtgggcctgggaaggctggagaggtagcctgtcagggagctgctaacccacttagaaatactcttattgacataacaaggttttttgttttggttttttgtttgtttgttttgagagagcgttcgctcgttccccaagctgaaatgcaatggtgcagtctcagctcactgaaacctccacctcctgggttcaagcgattctcctgcctcagcctcccgagttgctgggattacaggtgcatgccacgggtgcagtggctcacgcctgtaatcccagcactttgggaggtcggggcgggcggatcatttgaggtcaggagttcaagaccagcctggctaacatggatataacaaaattttctatttcaaaagttcagtcgtgggcacaagttgattttgccttacagtcttgatagtgaaggtgcatactatttttaaagctgtattccttagatactaccatattatctaatgtttctaataatggaattagcaaaaaatgactacatcatccaaatttgactttgtactaacatacttggcgtactccatatccctgaaggttaacaagagataaatttggcctagactggtcttttcctgaattcatcacttaaaaaaggaaaaaaagaatggggaggaaaagccacgttttacttttataatttttattccatcattaaaagtacaacttgctttatgatctgaagaaataccatctaagtctttctattaggaacaaaagtgagcctttcagggaaaaaaaaaaaaggagctgggcttaatctgcattagccctttgatgtattcccagattttaaaaagcttcccactgttctcagccacgttgaaacagacccagccatgtgtccggcgctgtccttttctcctctcagcacacacttagccggagacaccttttggccaatgggccaggattcttccattgcatcttcagcatgtgaccgtttgtgctggctcattgggagttctgctgctcagtactccttccccaggcaaagactcttaagttaataattggttcagaagaataaactataccgccctcttggtcttcttttggacatttctttaagatgaggctcttactggtatatctggggtactttattgagaaatagaaagtgctagctgaaataaggcgtatcagtctagagttaggaagtgagaaatgcaatcggtaaattttgcttttaaataaaaatggaagccccattttaattgttgccatttctagtcattttatcatttttaacagcctggttttctattttagagaagttgctgaccaatatttagagagcacctccctaatctgcacatcctcttgtgtgtgatggtgaagtgatgggttggaatcgtttttaatgctgtttccattgatgggacattattaccagaaggagtgctttgtgccagctggtttcatggatggaggaaaacaatctgggtttcagtttcacaaatagaaaaacaaaacctgagaggaaaaggaagtaattcgttagcagtggccactgtgcagagtaggataacctgccttcaaagatttttgtttcatgcactataatataatgtttaataaatactttacttcaaagaacctcactacaagaaaactggccgctttcctgctattcttgttctccggctcagtatgactataagtagctcatatccggtcctctgtggtctcaggtggtcgtttgtgtttatgatccttaagctgaaactgtaaggactgtgtccctattttaagtctttagcagatccaccgtgttctgcaggaattgacagaggctctcgtgaaacccttgacactttgacccatcttgaggaaaatgcttagatgctaaaagcagtgtgcatagggattacgtcctccaaaaatagaaaactctaaatttactaagcagggagtagagaaactcatcagactgcacctcaagtttttgatgtgttctggtcgcctctgcactcccattctagacttctaaacaacacgttcaggatctctgagataaaagctggactgaagttacagaaagagcattagagatgtttgaatttttcttttttcccccctgtagatatatttggcatatgtagaatttgagagtccactattgataccagtttcttccagatattaacacatatcaaatagacagctagaactcagaagaaactaatggagctctgaaagaaaccattgttttttccactataaatcttaactcaacagcatttagggtctgggtggagccagtcacctgggcagctgcttcacacccattttgaattagctgcccagtgcttctggtgagcacctcggtaggagccactgctgtgaactcttttgcaagttctggtggtgactggtttggtttttattgctccctgtttgatgcactgataggacctagggctgttcttagaaatataggcctgagacgacttaaatttcacactggttttgtcttccgtttccacattcctctcactgactctccctcccttcctgccctctctctctctctcatatgaaatgagtttaaaatcagaggggaaggattgctttaatatttagcagtctaaacagagggggacagggctgaagaggaggaagggagtgaatgggtgtagaagagaaaagctgttcccaccccattgctttaatgacagtggaaagggtgcatggattgggcctgtgtttctctatcagctactttgttctttaaagcactggctagctaagccatctctttctctcccatattttgcctctttgagtgtttgcctagaaccacttagctgtggcagccctgctgatggggcaaggtgctctgcaagtttctaggcaaggtttctggatccatgttgaaattgaacgcagatagcacaaccatattataacagctacttacaaaccagtcagcacatgtgtggtgagcatttctagagttgagttattgcttaggtcaattgtaagaggagtttctctgaaagagttctgctctttgaactggcaaccccaactctagaacttacagaattgtttttgttaatttttctggcaagagattcatccaagtttcctaaacgtactacaagggtatatgtatacagagaccttaaggaatggccagccatgcaaaccctagggaacatcttatctgacagttcttgggatccacagtggcttgggtcataatgataatactgtaactgggagagctgatgtatatggagcactcagtatgtgtgaggcaccatagattctctcttcatttaatcttctcatgagaaatacagacgttaaataattttcccagggtcacataagctggtactaggaatgaggcttaaagcagggctctctaagaacaaaagctgtgatgccttagcatcattgacagcagctcccaggtcttactcatcctagtgcagtcccgttagtctacctgagctccccctaacacaggagttggcctctgcccactggggctttcattcccactaccacccacagtttctgcatatggcaggtcggagcccatcgtagtgtcatgagccattctctaaaccaccgtctgcctgaaaactgcctcattctctgtcattcctgaaggaaggactctggctggcccatctcatctttactcacctaggtgttcaatggatcactgggtaatctgagggttgatgttcttctttagtctatcaaccaatcccagagatgggaggcagggcttacataacactgtaaatactgccacctgggatgacttctgcgggagaagtactgagacccaagtccaccatgggaactaactggataagtttccgaagatttatgtcagtaacattcaccaccgtgtcctttgtattcacaaaataattagaaactacctgactgtccatcaataggagtttagttaaagaagttttgttgttccatatggcagaatattcatatgcagccattaaaatagtgatcaggtaaatgtttacaaacatggaaagatgcaatatgaactatattgtaacatgaaaaaataaagttaaaatggcccgtgtaggatattgctttgttttacaaacacaaagttgaggctgggtgcagtggcttatgcctataatcccagcactttgggaggccaaggcaggatgatcacttgagcccaggagtttgcgactagactgggcaacctagtgagacctcatctctgcaaaaaattcaaaaagtacaataagccaggtgtgatgatacatgcccatgaccccagctactcaagaggccgtggtggcaggatcgcttgagcccaggaagtcaaggctgcagtgagctgtgatcgtaccactgcactccagcttgggtgacagagcagagagactctgtttcaaaaacaaaaagcccccacaaacatgaaaggcttaatccaggactagtaatagttgccgaacttgagcggaattgtcttcatgctcttatgttagcatctgatattttataatgagcatatcccttatagattcagcaatatatttgaaaaatacaccaaggtaaaggagttgtgctaattaaaagtagctgaaatgaaaaatattgattattgaggaagaaaaacaatgaaagtaagacatagaggcctcagcagtattactgataactcaatcattgttacctgtataatagaacaaattaagggcagaggttctgaactgaagcagtgttattactaaggtgcttgaaggggggaacccacatttctttaatagcaacactccaggtttctaacatctggaagtatcacaccatgaattttttttaacccagaaaaactgggaaaaacttcaaatcactgaatgacgtgttaaccaagtttctgactttaagactttaagattattgactctgaatttacatagaattctaagaatttcagttagttgattgtgtgtgtggtgtgatgtttaaaataagtttgggaaatgctgggttaaattaatattttttatttcaggatgtctcaaaatctttactaagtggatgtctgttttgaatctccaagatggaatatagaatgcagcatttctcaaatggaatttgaccactgagtccttgttttctttgggcatgtactaagtagcctttcccagagctcattttgtgggataccataggaaatgctgcgatgggaccttttaattaatttattttttgagacagggtctccctctgtcacccaggctggagtgcagtggcaggatcatagctcactacagcctcaaaactcctgggctcaagcgatcctcctatctcagttcactaagcagctgggactaccgaagcacaccaccacagcctgctaattaaaataaaaaaaaaatgtagaaacaaggtgccactatgttgcctgggctggtgttgaactcctaggctcaagtgatcctcctgcctctgtctcccaaagtgctgggattacaggtatggccactgtgcccagccatatatgtatatatatatattttttaatgaagccacaagcattctgcctctgtgctttttatttatttatttatttatttttgagacggaggttcgctctggttgcccaggcaggagtgcaatggcacaatctcggctcaccgcaacctctgccccccaggttcaagtgattctcatgtctcagcctcccgagtagctgggattacaggcatgcgccaccatgcacggctaattttgcatttttagtagagacagggtttctccatgttggttgggctggtcttgaagtcccgacctcaggtgatccacccgcctcggcttcccaaagtgctaggatttacaggtgtgagccggccgaccctatatattttttaaaagcttttaagaaacacagtaatctttgagttgagattttgaaaaaaattgcaaaaatattgcacattagcattttaaagttagtggaggctgggcatagtggctcacacctgtaatcccaataccttggaggctgaggctggagggtcgcatgagctcaggagtttgagaccagcctgggcaacaacatagtggtatcctgtatctacaagttttgtttttttgttttgttttttttttgttttttttttttaattagctggtgtggtggtgcatacctataatccagctactcaggaggctaaggcaggaggatcacttgagcccaggagtttgagcctgcagtgagctaggatcgcatcactgcactgcaatctgggcagcagagcgagaccctccctcacaaataaagttagtggaaagtgctatagtaaacttttcccagttttcccctaatctgttttaccatgggccactcccttacccccacttttattttttttcacattagctattaacatgccctgaaagtaatgttccttagaattccatcaggcaacactactctagatcagatctgcaaactacaccccaccaactgtttttgaaaataaagttttggctgggtgcggtggctcacgcctgtaatcccagcactttgggaggccgaggcaggcggatcaccaggtcaggagatcgagaccatcctggctaacatggtgaaaccccgtctctactaaaaatacaaaaaaaaattagccaggcgtggtggcgagcacctgtagtcccagctactcgggaggctgaggcaggagaatggcgtgaacccgggaggcggagcttgcagtgagccgagattgcaccactgcactccagcctgggcgacagagcgagactccgtctcaaaaaaaaaaaagttttatcggaacacagccatgctcattcctgtatgtactgtcagtggctgctttcacgtgactgaagcggaactgacagtgtaacatgcaaaacaggtaagaaaagattgaccatctagcccattgtagaagaaagtttgcccacctctgacctagatgattagtcataggtagttgcatttgcaaattgactaattttctttttacactccagcatgaatacatgcaattgaacagctaatataggtgtgtgtatgtgtgtgcacatatgtatactaaaatattgtaaaatgtcaagtgttgcaaataacattgttaactgaaagtgacggaatggccggccaaatttatatttattgtgtcaaaaacaaaatgtaccagacaattaagataattttacccaggccactgcagtaggggtaacgtttattaatgagaaatgtctcagagagaggaagaactagggttttataaatgcaggtgaacaagggaggggtccaagaattacggggttcatgaagaagagtggaagtctatggggaaggttgctttgcctccagccatttcctgggttaagaaagaggaggaagattctgtaactgtttctgtgttctaggagcacggggctcagggaaagttcagcattgtcagttgtcaacaaaatcagtaagtgttattaaataccccatggtgtgtggttctggcactgaaatggggctgtttcctaaggctctgtccatggccacctctgtctatttctgcattctgtcttgcattgcttctgttgcctatatcctggtcagcacagtttatggtgaatcattgcttattgaaatagagacggcaataatgaagccagctattataaattagagcaaatatacacatccaatacgttttaaacgcatgtgatctctggagtagtatcactaggtagcttccatttcagttcgcctttggtatattactgtactccaaagaatatcatttttccctctgtaaaattttcctcatgaaaatggtcaccataggtctgatttactttttggatcagtaacaggtcacagcataaatcccattcctgcatcaaggcggaacaagaccctcacactttggagggagctgagttcctgtttagaagaacatgcacagttagataaatctgttcacacggcttagatgatcagagccaacatctgatgactatgagcaaggcacttttctaaacatttttagtattttctgaacagttttgttgaggtatactttacagataacattcacctcttgagctgcagttcaatgagttctcgtaaactgagttgtgcagccatcaccacgttccagttttagcacatttccatcaccccaaaagttcctttctgcctgtttgcagccaatccctgctccctggccagccacaggcaagcgctgtcaatgtttggacagtgttggattacctaatggactcttcaagacagtcctttggggtgttactgtcattctctgttttacacggtgaagaagtgaggcactgagggcactcagggtggtttcaaatgaccgaggccaggtgctcagggcccagaaccctcttaccccctccaacttcagtgagcttcaaaatcacctgctgagcttgtttgaccacagacttgtgggctccacccttgaattcctgacgccctaggtctgggatggggcttgacaatttgcatttgtaaaaagttcctgaatgctgctgctgctgctggtcagggaaccctgctttaagacctcctggtttatgcaatttcaaacattgtaagaaatagtcactcatgtgattggtttgtgtgcttggtgtagactgtacgaggatttttcaaaagtaagtattgttcattctaaaggaaggaaatgtatgttatgagatagaattatataataaacagaaccattaaatgccatctgaaaagtggtgttttcaatggcaggaagtagcattgctgcgtattttgtgtgtgtgcgcaactcagctttgtgtcattgtgtaactttaatttgaaagaacatcacgtgactgctgttttcatttctgccttttaaaaagcagacagctattcagaacagcaagaagcagacccaaactttgtttgtatgcccctagtcataggcaaaaatggaaagggtaatttaccaaaaaagaagaaaatagataaaaaggaaaagaatggaaagaaagtactgactcactgcaaacagctgcaaaatgttgcccttgggatagaggttaactcggttgtgaaataatggccaaagcggtgcactcttaataacttttttgtagccctggagaaagcttctggattgactgtgagaagcttggcagaaggtgctgcggcctggtggctggctcagcaggaggcctgggattgaaagctctcggtttgtacaagctcttttggatttgtaacacttttattttaaatctccaataaatgtaaatattttggtccctttttttctctattttttaaaataaaaatattttagtgaatatgagttaaatgagaatcaagtggcttctgggcctccctgaaagatcaagtggaagcactggatgactctaatgatgccgaattgtaatccataaagcacctgggcagagttcaatcagaggtcccatttcagaagttttttggaatgtagggaaagaattacttagaaaaggttcatctacttggagaggagatggttcaatatgacttttagaagaagccgcagtccctgccccacaggggctgcttagattgcttagatggattgtcatctctctctctttttttttttgggacggagtctcgctttgtcgtccaggctggagtgcagtggcatgatctcggctcactgcaagctccacctcccaggttcacgccattctcctgcccctgcctcccgagtagctgggactacaggtgcccgccaccatgcctggctaattttttgtatttttagtagagacagggtttcactgtgttagccaggatggtttcgatctcctgaccttgtgatccacctgcctcagcctcccaaagtgctaggattacaggcgtgagccgccgagcccggtggactgtcttctctctaagcagtaagagacagtgggaactgcagaagggtgtttgcagcctcatgcagttgactgaatgaattggccccagagtcacccctagcaccatcttgatatggacaggaggcagggaaatactgggtagaagagggtggttccccagcaaaggccccaccctcaagcctggaaatccggagccctaaatgggaacaggcattcccgtttttgtgcccaaatgttgccttttggctcaccacgcccccctctcctgtatccatataaaccccaaaccccaggctccacaagcagaagagtggcagagcagtgcagcagagaaggagaaaagaaaaggtgcttctgaacattgagaggagttcggctggggaaggtagcagagatcagctatgggatgaccaaactccaggggaaagatcatcttcccactctgtcccctttccagctccgcatctctcaccgagagccatctccatcactcagtaaaatcctcacattcaccatccttcaagtctgggtgacctgattcttcctgaatgctggacaaagacttgggtaccaagagggcagggcttacagggctgtcacccttattctccgctgagctgttttaacacgtagccatccgcagatggcagcttctaaaagagcattaattgtaacagacccccagacactaccatggggccagagcccaaaagtgctcaccccagctcctacacctgcccctgcccatctgcgtgctctccctcccataaggggtttgagcacgtgtcggccaagcaaacgagcttcacccctgtcacaagtcctgagaggagtcagggaactctcccatttcattctgacacaggtgggactcagcattctcagaccttcaaaggcctgttgggtggatgtggaggtgtgcgctgccccaccaagctgatgcctgatcaggggaggccactagaatagtctcttgtacagcaacagagcctcttactacagtgagcttctcctggggctttcagagtacgtccgagctccacaccaagaagagagccaacccacgtggatgcagctcggttcttagggctgacttgaaacttgataagactgcctcaagcatgtgccacaaccccagttcttgcaaacccccacagagtcttgagaaatccctcttgtggtccaaattggggaaatatagaattagtcaaaagaaaaggctgaagtcttggtcatctacatgcttgcaaattccagccttcctggcctgtgagtgttgcatgaatatagcaggaagtcagcactctccatctttcacaaaacgtgatgtgtttcagtccgtgcccggtgaacactattctccacctccctccctcccaacttgcttgctttcagcttctctttaaagtacaccttaaaattcaatctatcattcagacatagagagcagtggcatatgagaagcaaacatttggctgggcgcggtggctcacgcctgtaatctcagcactttgggaggccgaggtgggcagattacgaggtcaggagctggtgaccatcctggccaacatggtgaaaccccatctctactaaaaatacaaaaatcagctgggtgtggtggtgcacgcctgtaatcccagctactcaggaggctgaggcgggagaagggcttgaaaccaggaggtggagattacagtgagctgagatcatgccactgtactccagcctggtgacagaggagactctgtctcaaaaaataaataaataaataaataaataaagggcaaacttttaccaagttctcatctcttaagccattgtttgtttaatggagtagtagatgatgtgggttgttatctaacaagaacattgtcccttgtgggactgcacttagcattcaccttcggatgccatggctaggtcaggatgccagcctaagcagtcttgactttagatttgaaattccggccgggtacggtggctcacgcctgtaatcccagcactttgggaggccgaggcaggtggatcacctgaggtcgggagtttgagaccagcctgaccaacatggagaaaccctgcctctactgaaaatacaaaattagccaggcgtggtggtgcacgcctgtaatcccagctactcgggaggctgaggcaggagaatgggtttaacccgggaggcggagtttgcggtgagccgagatcgcgctattgcactctagcctgggcaacaagagcaaaactcaaaaaaaaaaaaaaattttgtaattccttcaacacattataacatgacaagtgcttcttgccttatctactagtgaagactctgcccggcccgctggcttcctaacagtcctgtggcggtctgttctttcctgtgtacactccttaaattgtgacatccctacttctggaaagctcaccatttcctatacccctatttgatttattttatcccaagacttatctcaaatcctccctgctcccaaaatcctcctctcactgccttagttctccctctgaaattccatagcatttcattttctcaacacagactcagagaaatttgctggtaggagggaccttagaggtgcgattctcaaccggggcagtattgcccccgggcatattcggcaatgtctggagacatacttggttgtcacagctgggagggagtgctatggcatctagtgtgtggaagcccgagaccccgctaaccgtcccacccaacacaggacaactccaaaacaaagattaatccaggctttcggctgctgttgggaaacttgtccacattaccaccacatacctggttccacaatttacctctacatgtgcatgttcctgagtaattgcacactttgtaatgtctcgtagcccctatagctagtctagttaatttctggtcatcatggaaaatgccacctctctgaaatggccagcactggagagacgctactgctgctgatggtgaatgtcaggggactactaggtgtcccttctatttttgttaacttgtagttatttgtaggatgattgcctttagtgcagaaaattttttttaagtttataaagcttgtgagaaaaatccttatttgtaaagaagctcagtattattttgaatgttcttgcttctcatttatgactactcaataaagaaaataccttttcctgctctgctgtccagtttgttgggttaatttgggagatagtgtcagcaccctggaattgtgccaacttccaattatcactctgtgtaaccactgacttcaatttcaaagtaattactgcagatttttctcactaccctgaacatagcctacacgcttttaatcctacacttatttttttccccatctaaaaggaaaacttattttgattttgatactttttaattttttaaaacttattttgaaataacttagacttgggaaaagttgcaaaacaataatacaaagaatgtccagataatttcacccagagtccgcaaatgttaacattttatcagggttgatttattgtgtattcctctctttctctctctctctctctcttcccacctccaccatctatatatgtaaataattggtatcttctgaaccatttcagcaaattgctaacagttcttaagtgtgtatttcatcgacacaggacaacattcccttatggaactgcaatgcagtactgttaccacaattaggaaactgacattgaaacagcaccattgtcttatctacaaacctttcaaattttgccagttttcctactctttaaaatgttttcaaattgttgccagtttactcactacaaaaaatactgtctttaaagcaaaagaaaaagaagtgttattttctggcccaggatccgctcagagtcacaccttgcattgacttttcctgtcctgttggtctcctgaatctcgaatcgttcctccgttgttctttggcttccgtgatcttgacatttttgaagacaggccatttattttgtcaaatggctctcaatttggattcatttggtgtttcctcacagtcaggttgttactcatttttggcaggaacgtaacggtggtgctgctgcgttgtcctcgttgtcccctctcgggaggcgcatgttcacgtttctctttgtcccactgttaatggcatcactttgatcatttggttcaggtggtgtttgtccctttctccactctgaagttactactttcctttttccatttatctggtaaaggaaatagacagttaagctggtaatttcagcataatatggtgagtgttaaacagacagccagggtgccttgggagccagtaagtagatgtcacccaacctggtagctcagggaaggcttctggagttgatgacacctcaactgtgacttaaggtaatgattatgagtcagccaagccaaggaaaatggggaggatactgtagaaggacatgataccatgaacacagccatggagccacgaaacttcatggtgtgttcaggtcgctacagtggctggcagcttgagttctaggatggagttcggaagatgtcacggaatcccagtatggcagtacaagtgcacttgttctcacgggaggctggaagcaaaggctgtgctccttgttcctcaaaagctctagggtctcttttgtctcttaattccatagttctctctcccctaattaacacagagctaaaaatagcagagaaatggggaattggggggaagattatagtcaaagaagtttcatcacaggatgcacagttaatttggttgcactggaaattggtttccttctcttagaaaataaaaatcatctttgcaaaaaattgtcacttctttttctttcacttttttgagggtgaaaattagtgaaaaatgaaaatatgaacaagttgtgcaaataaaactaaaaagtcaccgaatttggctttgaagtatgcatctgagaagcctactattctttggcttgaatgagaagtgtaagttgtggaatggtaaagcagtgtagcctctttgacacccagccaatttaatttttttttttttttttaattttagtggcagtaagtactgacttaccaaggcttggggtagcagatactatcacagctgccaggacttttccaggctcctgtcaagaaactgctgcaattctgcaagagtcttcagattaaattcatgccaagtcatttcctctgttcttctaccagtgaggtcacctttgcagctgaccattagtgatgctgtcagcaagaaaaggattatgaactgaggtctaaatttcagtgatgtctaggcaaaaataaatgttcaaaagaatttagcgaggtttccaagacctggtaaatttctccctaagagaaattgccagatttgtgggctcttgattttagcctgaagaatcacattcttcagcactggaagtttttccttctttttttacttttctttttttttagacacagggtctcactctgtcacccaggctggagtgcagtggcaggatcataacttactgtaaacttcgaactaccgggctcagttgatcctcctgcctcagcctcatgagtagctaggattacagatatgtgccactacacctggctaacctgtttttttgtagagacaaggtcttgctatattgcccaggctggtctcaaacttctggcctcaaagtaatcctctcacctcagcctcccaaagtgctgagattacaggcgtgagccaccacacccagcccaacattggaagttgtcatagttatcgccagttgcctctctttttgtctggagatgtgtaggttagccaaaaaaaaaaaaaaaaattaccgatttttttttattttttcattcacaaatattgaatgtcttctctatgtaccagatactattatgctctctcatggaggttagtactgtctactggagaagacataccaaaaacaagagagagagaaagaggaaagccacaaatcagttggaaacacgcccgtattagtgactgaagagcctgcaaatgaaagctttacaaattcatatggccaaatagatttccttgctccttgagttaaaattcacataacacaattaaccattagctaagttaaaacatacaattcagtgcatttattaacgttcacaacgctgtacaaccatcatctctctccagttccaagacgattcatcaccccaaaaggaaaccccatttccattaagtgatcactccctattcccccacctcccccagcaacccctagcctactgtttgcgtgtgacttcttccactcagtataacacttctgaggttcatccacactggagcatgtgtctggtctttgtaggtttattccactaccaaccatgttctttatgcttaaaataactcctccctattgaactgttttggagtgatatttcctggggtggaggtagtttaatgattcatctctgtcttgttagcatgcttgtttatggtagagagaaattttgtattctgccaccataccttgtcaaaaccttttaacaaggcattgatttggttctctggttctgagaacttggcagtggaagacaagacttccacccgcattgcaagcaaaatcattgatgtcaattcacgttattgtggaaaaccgtgagttgtgacaagtgaaagcttttcaccaagccacaaaactatgggcgtgtgcagtcaacacacggaacacaaggggtttgcttccgtggctcagcatagcactctctcactagttctaaaatattcatagcctttgctgttcccaaaagacgtttgaaaaataagacttctcctttgtcagcatccgcgctcacataactggtgaaactaggagatagttttgtatcccggaagataatcattgttccattcaggtgttgggcagagagaaatggcttatctgcacatctgcaggatgtaagagattagtgaaatatttgtgattctgatgttgatgacttttaatgtttgacagagaaacttttgcaattattttcttctggtccaggcctcactccttctagcccacatggctctagtcaacctcctttaatcagcagagtaataggcaagactgtagtaggatgcctcaagacagacttttatgttgggacaagtagtgtcttattaaggcggttccagcctttcatatcctgcctccttgggataaagagtgtttgtttacagagcttctgggatagactgctgcatgctgcatccgtacctctgttgcagaagcacatctgtcccattatgtctagtgacaaaaataagacctacgcctcagtgaactttgcatacatctgaatgtaagcaagacaagtatatttgacattttaaaaaggttttttctttcacagttttcaaaataacataggagaagcaaaggaaaaaatatttcttgtgtttctaattcacaggttgcttgagactttttttggaggtgctagcattttattggccacagttttgaaggaaaatacaatgaaatcatgcttctgtcgtttggggaaaaggaataacagattcattttttctttttttaaagatgagagagatagtatttggaatctatctttagactattctacctctgaatctaattgaagtaagaaattgggcaagaatggaatcttacttaccacccaggaaaaaagctaaacaattgtggctcagtccattttcccctgagactgtcttcagattgaggcgatcagtgttaaaatggatggaatcaccaggctctccacattctagtaagattgtagtacggttgaaagtcaaatgaaagtccagctcttcagtgtgtcatttcctcttgcagacaccagaccaagggcagtggtggtctggcgcttatattttgttattatttgttgagaccagaactctccttaaggatatatttatatatgttttaatattaaagtttcttttcaaggaatttatactaattagttcatgtaataataacatgtgcattccatttaaagttaccttgctaaattttctaagacttgttagcttccccatagtttttaataaaccaaaagatcaaacgaacagtccccagttgcccaaatattgagcagttaaggctggtttcagctcatctgaaatctgtaaacatttaaagagaacctctctcccagaagatagtgagcacggtggtattctccagtctcagaatattaaggttacttacagactagagaggccttcagtctatattaacgagttcctttcctaatctcacccttctaagaatatatttgatccaatttagggacagcaacattgaggccagagaaaaattaatggggtagtaactgtagacaccaaaacactccccaaatcttgagacatcaaataagcaagactgaatttatgcaaaagatactttaaagatgtttctttagctgggcgcagtggctcacgcctgtaatcccagcactttgggaggccgaggcgggtagatcacaaggtcacgagtttgagaccagcctggccaatatggtgaaaccccgtttctactaaaaatacaaaaattagccgggtgtggtggtgggtgcctgtagtcccagctactcgggaggctgaggcaggacaattgcttgaacctgggaggcggaggttgcagtgagccaagatcgccaagatcatgccactgcattccaacctgagcaacagagtgagactcttaaaaaaaagaaaaaatgtgtcactcagagatttttctacctagaacaagagtcatacatactttttgaaattattttatctatgtaaacttacgaggtacaagtgtaaatttgtgacatgcatagattgaatagagaggaagtcaaggcttttagatattcatcacctgactaatgtacatggtacccattaagtaatttctcatcatccaccctcctcccaccccgtcacccttctgagtctccattgtctactatcagaaaagccttctccagcagcgcattgtcagctgagtctaggagaagaaagccttctcatggacatgagctaaattccctgggaaaggccattccataatggagaaggccttctgttcacccacagtgtggtcctcagaccagcagcttcagcgtctcctgggaactcactagaaatgcagaccccaggcccagtgtggcagctcacgcctgtaatcccagcactttgggaggccgaggcgggtggctcacgaggtcaggagtttgaggccagcctggccaacatagtgaaaccccgtctctactaaaaatacaaaaaaattagccgggcatggtggcgcatacctgtaatcccagctacttgggaggctgaggcaggaaaatcacttgaacccgggtggcggaggttgggctgagctgagatcgtgccgctgcactccagcctgggcaacagagggacactccttctcaataaataaataaataaataaataaataaaatgcacccaaacctgaattggaaactcaggtggggggcctagcggtctgtggttttactagccctccaggcaagttttgatgctttggtgattgagaactgctgcttatgctgtcttggtggagagcacttcagccagtgcctcttctgctgattctgtatttatcaaagaaccactgactataatttagtgctcacactacagttaggaggtgtgtgagttccctttacaaacctatttctgattgtaaattcctaagatgttttacacatcagtatcttgtgagcttgataaaagtgaatccatctcgttcagagtgatgcattatgagtgtatagtggaagtctagcttctaagcctgtgaaacagaggcccagccccctgatccaggcagatttcactaaggtagaggccagggtagatgtccctgctgaacgggcaccctctcatcccacctcaccctggctgtgtgtactgtatatttttaaccaagaggagagcagagcggcacagaatggctggtactcagtattcctggtttctggattatacagatgcaagggaaatgtctcctagtcttatttcatgagttactgtgtagcattattgaattgcagtggtaagagggttaggtaggcctttctcatttttgattagacagctatcatttacaaattagaccacagggaatcgaccttaacttctgtgactaaagcttttggcagttacttttggcatttctggccctctagacttgaaaatgactgagtggttacaatttacaaagttaagagagctttctgttgattggtgtgaatggtaggatatgagacagactcttaggagtaaaggacagggatttagggaaaatcctagtggagtcactgcagccaggcagagttgtctgttacatgcagataacaagtcacgctgttggggttaattagaaaaagaggaaacaaagttgagaaaagaagagggaggcagagcagacggcagaggacaggaattttcagtgcagcgttgggaaaggttgtggaagctgaggctgacgcagacctagggcgttaaagctgtatttacagctggaccttctgattcctggggaggaggggaggctggatcgtgggtaagagagactggcagggccagtggaggatactctcccactggagttgtccagtgggagttgtctggagttgtcctgggcagaggctgcctgttgacagaggctcagcacagccatgcttaagataagctagctaagcaggtacgaggaaaaataatttacctgaagttctttctggccgggcgcagtggctcacgcctgtaatcccaacactttgggaggccgaggtgggtggatcacctgaggtcgggagttcaagaccagcctgaccaacatggagaaaccctgtctctactaaaaatacaaaattagttgggtgtggtggcgcgtgcctgtaatcccagctactcgggaggctgaggcaggagaatcacttgaacccaggaggtggaggttgtggtgagccgaggttgcgccattgcactccagcctgggcaacaagagcgaaactccatccccccccaaaaaagaaattataataaaataaagttttttctgtattaaacatcttgtgtttaaaagtctacagtgagtcaaggatgttgaatggccaaagatcataaatctctccctctttaaatgagctgtgggctgggcacagtggcttatgcctgtaatcccaacactttgggaggctgaggggcatggatcgcttgagcctagtagttcgagaccagcctgggcaacatggcaaaactctgtctttacaaaaaatttaaaaaaaaattagccgggcatggtggcatgtgcctatggtctcagctacttgggagactgaggtgggaggatcacatgggctgaggaggttgaggctgcagtgagctgtgatcacactactgcactccagcctgagtgacagagtgagatcctcaataataagcagtcttcagtgtttcattttacccaggctaaatgtatttgtagtatacatatatgtttatattttgatagattcatgtgagtaaaagatatacaataaaaattgacattaccgaaggggagtgggattagatgtgagagggtggattagtaaattgttttacacacctctttaccattggacttgttacaataagcctataactatttttaactccataaaatacattgttttataagagctgtcaaatttcacttgctcagtcccctgattctcattttcttataaaatctcaggttcctcaaatatgaattcttctgccatgagaaattagcaacatagtcttaaagtctggggaaagattatagtcagatccacatagataggacaacgttccaagtcgggagaatgttcatatgagaattgaatagaaggccaaatttttaggctaagaatatgatcagaggacacttccagtggagagagtcagcgtgaagagttgaggtgcatggctgttgtgcatctgagagcgtgtacgcgggcgtgagagcgatttagatccctgtgtgttgaattcgagacccacccagacagcctccagtgtcttctcagtgactgtgcccaagatttctgtccatctgtggacatgttttaatgacagcaattagtggtaatgatggctattaaatacttaatgacatttctgtgttctgaggcttcttcatacaagaattcacttactggccgggcaccgtggctcacacctgtaatcccagcactttgggaggctgaggtgggcagatcaagaggtcaagagattgagatcaccctggctaacatggtgaaaccccatctctactaaaaatacaaaatagctgggtgtggtggaacgtgcctgtagtcccaactactcgggaggctgaggcaggagaatcacttgaacctgggaggcggaggctgcagtgagccaagatcatgccactgcactccagcctgggtgacacagagagagactctgtctcaaaaaaaaaagaattcacttactttccacagaagcaggcactgttatgatccacagttcataaagaaggaatctgagacatggaaagtcgacctttcccaagcttgtaagtggaacagtattctgactccagatcctaaatggtaaaccactactctctgctgcctcgcagcctggagattttctgtaagagaggggctaaaataaaaaagcccacctcatattgatcacattcttagtaatccttgaatacgtttatattgtgtcattcatgaatgtcttttccctctggccagattatggtatttaggtcaggagccattttttcttgtttattttgtattcttacattgcccagatatgctcgataaatggtttttgaatgaattaaccaaactgtttctctaattcactatgcttttaactgtctaaggaaaagacaaccgtggggtccctcgctgcatgcctgggaacctctctgaacacggaatcaacttcctttctttgattttagagccagatgtgatgtttgaagaatgtaatctatttgctctcaaacatggagagcatagagctagaactccaacaattagaagttaatctgagatgtcctacaatacatgattttaaaataaaatccaccagtgtcagtctggtgcagtgactcatgcctgtaatcccagcactctgggaacctggggcgggcggatcccttgagcccaggagttcaagaccagcctgggcaatgtggcaaaaccccatctctacaaaacatactcaaacactaagcaggcatggtggcgtctgcctgtagtcccaggtacttgggagtctgacgtgggaggatcacttgtgcccaggaggtcgaggctgcagtgagccatgcctgggtgccagagtggtaccctgtttctctgcccaccctcccccatcccccccaaaaaaatccaccactctttcattctgaacaaccagagatgtttggaaaggacacaggaaataatacctggtgaatagttactctcgagcacttgctaggtgcgctgcagatcttcgtaaatttaatcctcaaaacagttactcaagacctgtattagcttgattttagagttgacatctgtctgagaaggaggtaacttggtcagaaggtgccatctcgttgggatgtcacagtcgggcctgttggcttcagagacttgggctttcatgctctgctgctgccaggacgggggccacatcgccctgtctcccgatttctcccatggctctccaggacttggccaccttcagcatcgtgtgttctgtacacagcacagcatgagggtgccagcagtcctccttggctcagcgtctaggatgtgtcagaactgtaaaccccaagattcttaggcaacccccctaccagcgctcatttctgctacttcagaccagaaaccttcgcgggcgggggtgggggcgggggcggcgggggtttcagttgctttctgcttcagttttcttggccgacggtctacctcacagtatcacagtcatctttactttcgtttactctgcctttctgtattttagtttctgaatttctgtcccataaagccagcatttaggcattttgaattttgagtttcttcagtgaattcataatagtaaaaatatttaagaaaacctgtaaaggcaagattgttgttgaagcccctcacattagaacacttcccaggtgctccaacctgggggggactgaggacttacatgggaagtcagagctccccatcttttttccccaaaggtcattcattctgacagcatgacttcaacttgatatgagcaaagagcatttcagataggaggagaaaaaggaagagggttgggcaccgtcgtgaaatggtacacttcctcaccgcggtgcttatctacataattgtgtttttataacatttcctttacttttctgtaagctgatgctgccctaattatagatttttaagagaacacttcattgtaccccaaattatacagtgctttaaaaaggtactttcttaccggtttaccaaataccttataaattcgtaattacataaaacaattcgagatacagaatagaaacagcctgtactgttaacaggtgttggtattgttatataattgagtacatggctttcaaagatctataatatttttcttgagtaaaaagaaaaaaatgactcattatagtcgtaatgtgtcacagagactcctgatcaaacagaatgcacatgttctattttgtgcattctgtacagttcattgtaaatggacttgcctttgtggaagtgaaagtgccacttattccagcaaattgcctttgtggcatatgcacctacttgttagacagcttgggggcacttgggccaggcagaggctgggccccctttatcatgggcacacctgcacacatggcactatggcgccacactccaggtaggctgctgtcattaacagacttgctccttgggaaacccactgaggacttctcagtgccctcctgcccatcagagaccacctcggaattcttagaagactaggaatggggcagcttcctagacgctagctcttttcccgccacatcagttttaggcctctcttatgatacaagtgattcagattacaaggtaacctcagtgcaacacaagggaagaaataaatcctctctgttattgagtgctgggtctagtgtttaattttctttcttttcttttctttttcttgagacagagtctcgcactgtggcctgggctggagtgcagtggcgcgatctcggctccctgcaacctccacctcccaggttcaagcgattcttctgcctcagcctcccgagcagctaggattacaagcgcccaccaccacgcctggctaattttttggatttttagtagagacggggtttcactatgtaggccaggctgttcttgaactcctgacctcatgatcctccagccttggcctcccaaagtgctgggattataggtgtgagccaccgcacccagcctagtgtttaattttcaatttaatttttggcactatttttttttaagttgctcatcttaggacagtataactggaatgagccttgtgtttccagttacaaaaacaagacagaacaaaggatgaggctagatttttgtattattgacaaccccatattcttccctccagaggagagatcatctttcggaagcaagcccgagatacacacagtcttacccattccttcaatgctgttgatgattagccttaagatggttcttttctctaaggaaaccctccccatttttgcaggatgtttgaaaaatgagttgctgaatgggcttcagatattcttattcttctgttttgttgggattttcttcccactcctatttgtgttaatttttccctcgaaaaatgagattgctgctcactgccgttgagcctccttgtggcacattcattggtccagtaaacgacttaactccaagaaccacctaccagtaacacaacaaaaccttgagtacagattgattcataaatggcagcggacgagtgttgaaagtgacgcattatgtcgctgcaatgtattgacattatcaattgtgtgtcactaaacagccaggctaactggatgatttactttgtgtttaactgcctttttcagttggagcaaatgttgaggaactgggatgcaatgtcagaaaccatatattttcttctgttaacaccagcttcactgaggcgtgttggttttggctgcaggctgtaaggctctagtgtaaaaaggtctaaacaagtgattaatgcccaggaggcagggctttacactgtctccacatcttttctcctttctatttgtgttgccttaatgcttggggtggggggttcaggctatttattgtgctgacgttggtttccatcctgagagtccttgatgtttctttgtggattttgtttgtttttaatattatttagcataataacctaaaccgtaaacgcttgcagttgcgatccaggtgtccttagttcagcagtcagacgtataataagggccactctgtacagtgaaaggtgacagctgtggcccccaaaaaagcagctctggactttcccctcccaagtttcagtcctggtaacttgaactagacttgctagtttcttgaaacattgttttattttcttgcaagttagtgtggtgttcatatttcacaacgctgaaagatacagtgtttctcaaatgtgcacttgccagtagacggatatgttaactgttaccgtgacgctgagaactggagctgctaactgaccctatgcgtttgttctctgcgtaaaatgttgtaacagtgctaattactaagcagctgaatttgtgagaaggtccacagcactaatctgcgcctcagtgttgccttgctagtgagaaaacgtgagcatgtactcaggacacatgtacttgatgatgaacttccaggggcacgtttatctgtggatcacggacggtttgacttgtgggacgtaacatttgatttctatatgtgcgcttttgagacactcgtttttaccctattaagagttgttgagtgcagaacaagacattttaaaagggaagagtaacattcagagattttaaaacggaagcttttaaattactacttgcttctgtttattttttattttttgctagttttagaaaaacaaggaagaatatctcaagttggaatagtcagatttcagtgtttgggtgatggtgttaaaatcgttgttttaatggtagatgaaaatgattctgttctgttggattcacatcctgaataaatgtttctacacaattagagtctataacagactaagccagcatagtggtggtgtgggttttttgttttgtgttttttttgttttgttttgttttgttttgttttgtttttgtctaaaagaacaacttcaagccttgggaaagaatttgtttttgccctgtggatgggtcagaaacatctgcttcaggtatagtttacaagcgttatttattaacccatgagccgaaaacccagatgaggagctctgactattgaaaactacacattccatgtttttataaatgtatattaagatgaattccacatacctattatttggatttctggcagccggaacttctacaaggaatttgtgtttttaaaaaggaatgtaaaattaatttttcttgtatcagagttttgctgtatatgaagaaatcctgctcatgggcagaaagcaaaggtttcaaaggaacctcatctccatatggttttactcgataatcctttatccaccatcttcagctctcattcctttgctttctcgcctgtggctacatttctatctctgcatcaattagcacagtgatttatacaacaagcaagcagtttagaggtaatggtacacaattaacatctcattccaccataaagggtatgctaaataccccagtcattgctttctctgcctggaattgaaataagtgtttgtcctaattcatatgctatctgatgtgaagtgggcctgctttgtaccgcactacaccattaatctaattatagatagctgcaaatgaagtgctgtctgagctgggagattgaagaaaatagccttttgtcatttagcatgactctgtgaagcaagatcacactttacagggcaatactacaaaatggaaatctcaataatattgctgcctgttgcatcttttctaattacaacaatattgtaaacacaactgggcgctgatataaatagagctgtagatatgctgtcatgtgggttgtaggagaaagtcctccgagtgctgttggattaaatgatgcatcctgattgacagctaccttgagactgcactgatggagttgtcacagcattatgctaacaggctgctccagcgactgcagctgtaggaggctgtggttcgccctgcgccttagctgctgcctgtccatgtccgctcctttgcctgggctgcacctccaaaggaaggacggccgtaggcttcaattctgtgtattgtcactgttgtgtcttggagatttgtggtggtggtggtgtagctcagatatcaggcgattgggccctgtgcagaagtagagggaaattattttgtatggctcctaaccttgctctgcttttcctcaagtgataattgtgtaccctacaaagaatttaggagagtagaacgtggttgaatttcaagtctcattccactgaactgttttaactcatatctagtttttctctgcttttcagccacgccagtgtttttaaagatgcatcatttttgcatttcgcgctttccatcactttaaaaacactgacactgtttctccagctctgagttaggacagtagacctttaggggaatatttgagtgttgctctcactgccacgctgcggaaatgaagacagagcttaatgttggagacctttggggccagaaggtgtaaaaccttgactaggaagagagcctaatctttgaagaagtgtctgcctccttacttagtgaggggtgcatggacagtatttggccagtgcttcaagatagctgatgcacagtgatttacagtcaaagatagcacctgcccttgagttggtattgactgagatggccaacagttgaggacatgaaagaacattaacagtcagtcaactgtacgtgtcctaattgttactggaagaatgacttataaatggaaactggaagtgagcccacttgaagaggaacggaggttgacagtggcactggaggctttgaaatcacagctgaaaactgtacagcaaactgcaagcgctcacctcgggagcagccgcagacctcgggatcattgcaacatttagcgcatggggtctgcagaattacattactgctacttctacaggctgtggaaaaaagtgggtggatttaatgctgtaaggaggtgcatgtactgtacaaatacagaagcctccagggtggtattctgtgtatccgtgaaagtggagtgtgtctcaaagtgggtcattctttgctgtctttggggtgctgatttctggggtgcaggcatacatgcccagttgcaggatgcttttcttaatgaggtccagtgataacatccctctctcacccagactgtgactagccgccgcctcctgctgcagcaaccactctcagcccccaggctttcaataggtccacggaagagctgcgtgtcagttttaaaaacaatcccactggtgtttcttgtcattgtcctgctcttgtggccttcctcctgaccctttcatgtcagctgtgattccttttctttctttcttttaatcttttgggagaaattttcttgttagacatgatttcacactgtagaggccataaaattaatttgcttagagacccgggttcgggtcacctttccgtcattcagtccttagataacacctcattccctcccattactgtcgtgtgtgggttgaggagtcccaccaggccaagccagagagcaactgttctgttctcacttacgtggtgagctgtttttcaagaacattttttttcatttggctgtgtggtctggagaacaccttcctaagccagcggagtgaagttccacgcactgaccagccccgagctcactggagcgagtcatcttccggctccatggcagcccagccccacccacaggcagctgcctgtcacccacgctggcatgttccctcatcctacccaggcagcgggaaaacctggctgcttctgggatcctactactctgtcctgtccacaagccttcagagtcttggattcctaccctcaaacatcaactttgtgatttatcttcttgaaaacaaccacaaaaacttaaaatcaaaactctctaagggagtttcgcacaacccttgaggaatagttaaatgcccacggtgaaaccgagcttgtaccccacggtccaggtaggggcacattcctgaagtctcacaaagcattggctctctgtgcccccaaagaatccagagatgctagtaaatagcagttttgatcagaagcttggaaggccctggtgtacattcttaaatgacttcttttctggggcatcaaaaagcttttacggttctcaccaggcagttcattctgatgggcccctacgctgcaccctgcttgggccccatcccggcacgcgccccgtgcagcacagcacaggccagctgagaggctgttttaagaaggcgtgtttgtgtggtacactcacgggctcaggacaacatcaaaggtaatcttaaaaagagaatctctctctgtcttctctttttatattcagaaaggtcatttctaaaccaactatttgcaccaaggcctctctggaggagtttaccccgttgttattttttacttgctattacaataagtcacttatcccccaaacagatttaagaacaataaacaaatacaaaaggaaaaggaacatctcatcagtaacaaagactgcatctaaaggcattgagtttgtgattcttttacatctctttccaagcaaagcaggagtcctacagagaaaggaatctgaaagatgaaaattataaaaatagtaaaaggatccagtgttcgtcagaatcttgtaatttctggggagaaatgaagctaaatacagtcttagcgcttcgttcatatgcaggctgatctgtgatataactaaacttagtttttggagtatatccactgtggggaaatgtggtaaatcatattctcagcgaatgaagatacttttcctgaatttaggcttcatattttgaagtcgaattctgcaaaacaagaaaaaaatagatctgtgtgctacactgaaaactgaacaaggcacgtcgtaagtcagtcacacagaaggcgcagctcagggcgataccaactagaaaagtaacttttttgttgactctgatgcctctagtgatgttggattttttcccccattgcagacagcacagataggaaaactgtgcaatttggtccaattatagtcctctctgtccctccacaccttcccccattgatttaatgaaggacttggaggtacaattcactgataaatagtccctctgcccagaatgtttattagactgacagcagcgtgcactctcctcgctttttccctcaccacttatgactcagatgaattttaataggagcaaaaagcttttatttgcactgtaatttcacttaaggaacatatccttcagaaactggcagacgcttctatgtcttgattgcaaaacacacactcaggagtaaagaaacatgcaaaagatgttattattcaacctgtcacagtgtcgcaaatccacttggaacttaggccatcaaagctctgcccccacccttttcagtaggccctgtgaagaggcacttagagattcccgccgtccccatgcagaattaaagggggaattatattttgtttttgcatccctgccatcatgatgcccacaggaggctttgagttacagcaggttttttgaatgaaatggagctgtctcactgctgcttctttcttacccaagagaaatcagacctggtagggatccagaaccttcgggtggtggttccaatttcaccaagagacacttcctcaaaccattttatcttttttctgtttggatagaccaaattgtggctcatagatttattcacggagaggataggaattctcttttttgaaatgttctgcttcactgaactgccctaaatatgcccgattgtttgagagccacctacagaaggtgccatgaatatacttgtctgtgcgtattttccatcagtgtttataacatcttgatgttattgtctctcagtgcagaaggctttctcattatcttgcatcttttcctaaccatcttgttacatcagaaagactacatagtgcctttaagaaaagccaacgttttcagtcatgaatataacattttctgtcactgaaaaaatggaattttaaatactattttgcccaaaatgaacactgaaccccattgtcttaacttactgatacgtagtgcagccgctcttggagggctgtgggaagctgcaacagccatctgctgccatctactggcgcctgtccacatgtcacctcctccatcccctgggtctgcccagctcatgggattttccttgatagggataagtttgtaggtggtgaagggaatacaagtaaaattctcagttttctttataacgttttgagatgtttttcttaaagatacaggatgatacttatcaatgattaattttaataactggaatagcccttatttcaagaactttctgaaatagctcaatatatgacagaaacaaatatattttgatgtgtgcagcaattgagaaccatttgaatttaaggctcttactgtaatttgaatttaaaagctaaaaattgatttagaatgaatgctacttttgaggaaaatttcatttaaactcatttatggtttggttttgtttttcccttaagtacaaggtgaatatcttaaccagacttgccgcagaattgaacaaatttatgctggaaaaagtgactgaggacacaagcagtgttctgcgttccccgatgcccggagtggtggtggccgtctctgtcaagcctggagacgcggtaagggctgtgtgtgtctctctgcaggacatgctggtctccaacttccccttccaaagcgacggctaacggcacagcacgattcggctctttgcagttcttacttaaccgacgccccctaaacagcaaaatcgattgcgtgtgttgtcgacctgtttcacgtttgcattacgttggtgccaggaccctcagcgcttcccctcccaaatgatctgggagtggagcagaaagaaggccagatgcattccatcattttgcaaatgcagtgttttgggaagtactttccttaaaagtgctgcttactctctagtatgctgtgctcaaagcatccattgaagtcatgccagggaataatactccgatgaggaactttttgcatgattcctggaacaaatgtctaattgggaagaagagttgaggaaaggttaattctgcaatctgtacagtaccagagcacttccattacttggtaaataaaatgtagcatcacagtttgaagtttttcatcttgatcttgtgacattaaagcacaaatcaaagctatattatttcctcgagataacttacatggatgaattgataggatgcacacattttcttagaacatggatagaaatctctactgatgagcagcaaaagtgaaaagaaaacaatttaggaggcaaccagatttccaggtacacttaaatacttgcatttttattcatgtgcaggaaaatagcatccggacatgactgtctctcatggatgaggtggtgattccgttttgtatctcaggtcactgggacttacattttagtgcctcctgatttctcaatagtacagataaaatatctgcttaacattgaggaaaaaatcaggtagttggcattggcttctagaaaagtatttgcaataaatgtgaatattaagaaaacatgatcagttttagttgtttgaatgaccagccctgaaactaatatgcgaagttagaaaaccgacttaacagctgctttacctggtgatacagaaatagaactgtccactttttcagaaaggcataaaagaggctacgtggctgtgaattgttgtttgctgtgaaagcattgatactcctggaagaaagccctctttaagactgtctaatgcccacgtgttaaggatttgggagaggccataagaaaaattacgtgtgtgtgtgtgtgtgtgtgtgtaatgtgtgtaaaattcaggggaggacatcttccttctccagagttagggtcgtaagaggatagtctcgtggccttgacattaagaatcgttcacttgcacgtgacattatcagagctgtcagtggaatcttctagtgactagatatgtaggttcgtaaacaatataagggttttgttttgtttttttcatttttcttaagttttttttctggaaggcatctatctagtctgtatactgccagcctgagctttccactcctaattgtgtggctttaattataaaatcgtgtgtgtgtgtgtgtgtgtgtgtgtgtgtgtgtgtgtgtgtgtttcaagtaagtgttttccttaaatccttttctaacacctgaatccaaaccggagtggagggagggcgggcagggatgagggagaccactcctgcctcaagcctggagggcaagagggtgagactgcagccctggcccctcacacggccctcaaggaggttgctcagaggcagtaaacggggcgctcccaaggccagatcagcgcagccttctggtttctttaacagctgctggctcctgatctgactttcccacataccgaaagggtttggcctttgtacgttccatttcctggttaataattgaatgtagaaaagcaaggcatttcgtaaatgggaacaatgtgatatcagtccttggttcattgatgtagctcagatattaaaaacacccaccaataattaaatgtgtgtactcattaagaatggtttgagaactgttaaaaatatgttacggcagagcaacggggcctatattttatgcattcctttaaattcagagtacctggggggcacgcgtagtgaacaggctcaggacctcgggatctgtcagctccctcctaagttctgtttgcgggggctgctcaggtggggcgtatacttgcttttatttgtcttttttggtacttgcagaacttcctttcatattctgtgccattgtgttttgatgaaacagccttttctcttgaattactgcttgtgaaaaatgtcccaaaccactaataccgaaacccaatgcagcctgagaagtttcatcgtcggctcttagcgcaacttctatagttaaattctgcttagtgtaattaaaacacaagaagcttccttggaccagaggcacgtcacttacttgaggccattgtgaggaaacactacctgtcacgttgaaattttgcggttttaagtgattttaacaccgcggggcgtgttgtgttttcctccgcactaacaatagccgggcgaggttccccttttatgggtgggaagataatggagtcagtctccttggtgtattttcaaggaaaataaggaccctaaaacaactaagggccttacaagtattctgtttttctttgaaatgttactttttatcgtttaaattccagtaatctatcatgtttctgtttagcttagctgaagtaaaacttgaccaatcgtagaatggtgggcctggcaataagttctaaaaaaagtgtcacataaatcgtaatgaacaaatctgttttgtgaagtaaacaatttgaacacagtttaaaaacctcaggaagaagagatgtggggtggccgttgagaagtagtgaatccgctcggggcgcttggtgtggcagggccttgtgcactgattcatttgaaacactcagcctgccctaaacacagaagctgtgttttatttgaagggcttctgtagggttcacacagcaaaagttcctaataactttttcagtgtctgttatatactatttaacattaaatgtggcaggtcacattttaaatgattgtgtaatagtttttccgaacacgtggagagaggatgttaatacacagtaaaatgcaggtaagcaaacaaatcaataagaaagtacagtggattattaaggtccagaatcagtaatataatttaggaaacaactgatagaataaattttagtgcctttttatatgccttctgaaaatgtttctgcagtaactcatttcagtttgaaaactcgttttcttagactcgtaacactattgtaaactgggagcacttctgtaatcaaagttagcatgactcagctgtttcaaacttctacctttatgatactcttgaacagaaatgttagaaatatatatattttcagaataacggtagaatacatttttccacatgtcaaattagacttatagctgctgaatttattgcataattttcactttgactttgaagtcaaataaagtcatgatgagcacattcgctttgttagccttttgatatcagaaacaaaaccaccccataagatagtcacccaaggaggcattttaatattgcatttagttaagattctttcaagtaatgttcgtattctgcagtcatcacagatttgcatcagaaatactcatttaatacaccaaacaaatgagaaacaaaccataagctgctatatactcatctgcatttctttctttcttaacaattagtgaaaccaggtgaaagaatagattgaaattaagtacctgttgctgctttttcttgcgaattagcccattcgatattagacttcgggatattttggtggggctaagatgaaaagatccacctcgtgatggaattgaccttcagcaggggacagtgaggtgtctgcggttgttcctcttgtgaacaacgccttaaaggcgagaaacagcctactgtacagtgtgccagggaaagcatcacatcggtgggcgtcggtggcaacaccacttacacttcaccctgattttgtttcctccttgcacgtgctcctttgacagggcaggctcccaagcaggtgtgcagtcagggccacaagacacaggcaccccatcccatctcagagtctgacgtcccctcctcccctttgtctctaagcctcatgtaactgagcttatagccgaccatacagaactggcaaacttggtgagatacctttattttttatttcttaaacaagattttaaaatttcataagctctcacgtatcctaacgagaaggcagggctgggccctcccgacgggtgtttgcctggcatcgcgcttgtgtgcctcatgcagcccaggctcgctcactgcatctttccctggcagaggggctagcctggctgcttcatagactttccagtttctggataccttgatttacaatcacaaaataattgcagtaattaaatttatatgttttatagcaatagttattcaagcagtttatttgacaagatgccagttttcacccaaacctcagattgtatctcacagcatgtacacagagatccatgcatttgttaacattttaagactttaaaattatgaaatactacaaacatgcagaaagttacagagaagaatccaacaagcactcctgtgccctttgttcaccatttccatatgtgtttcaaattttatttaacaatgagacattacatataacatgaacttcccctgtggcaagctcctccatctcattcctgtcctgtcttcttcagaggtaacgactacccctggatttggccttttaatcttttccagataacatttatttttaaatgttaagagttggtttttggccgggcgcggtggctcacgcctgtaatcccagcactttgggaggccgaggcgggcggatcacgaggtcaggagatcgagaccacggtgaaaccccgtctctactaaaaatacaaaaaattagccgggcgcagtggcgggcgcctgtagtcccagctactcgggaggctgaggcaggagaatggcgtgaacccggaaggcggagcttgcagtgagcggagatcgcgccacagcactccagcctgggcgacagagcgagactccgtctcaaaaaaaaaaaaaaaaaaaaaaagagttggtttttgttggaggtaacaaatatctattagtagataagaggaggcagaaaaagatgaggaggtaaaaaaatatctattagtactgggaatttttacagttgaatatactcaatgataattataaaataaaaaatatttatgtggatcagtatattaaatattataggagagtcttctccaagcttggcgtttgatttttcaggagtgatctgcttgggagtagaaggtgttttctttgttttcaacatttttataagtgaccattctcagccttaccaagatgtaaactatctttttctcttttaataaaaataaaagtttacaaaaaatcatcctttcacggagcgctttcaggcagcatgctttacgaaggtagagggtccaggctaatttccaaaggtattgtgaatgacatcagtttccactagttctctttgtaactgcaggctttggctctgattttgagctaacttagagggcagcagggagtcatatttttcttcattttaaggaattttaaaagaaactggacttgttttatatcggccacaagtctgtactcttacccttagccccttgggtgctgcccagttctggggagccccacttgagagacaaggggagcaccaggcagacggcacgtgtgcctgaagtcccgagccggcagcggggctggacgggtggcccctgggttcccgcgccctccagagtgaggccgctcgtgcatgggccattaaaggagtcttcagccggagaaagggctgggcggcgtctcctgcccgcctggtctgtctttgtaatttgatgatggttccatccttgctcaaatactgcagtctcccgtggcctcctccccgtctcgctttacatgaagatgttgggatgtgaatacacgtttcttcttcaggaaatatcaggggatatttaccagcctatcttaccggctcagaggaagttgctattaatataatcagatgcgagcaggcagtgccttttcactcaatctgagatgcctttttttgtgactgttaactgaacctttcttcagatctaagggccttaaaatgtgtggcattcaggcacctgtgttccaagcagaccagcctttaacaatgaaatggtgggattttcacttttgtggcgtagacaccagggctgatattgatccgtgtttttccggtggtccggcgttgcagaagtggaaactgcagcgggctggtaagccctccgagccttctgtctaatttggcagaaaaacacagaatgtaggacaacaaaagaagcctcctttttccataaaaattcttcctcccacccacccttcttccccaaaaaggggacttaatttttcagctgcacgcagtgatttggtgctcactcttgcatcgaaacagttgcggtctgaacaggcaggaaacagttttcttttaattgccgaaatcattcggaagtgcttcatgccctgcttctgtacagcagatgctgtgcattaattggcctgcgtagaagtgacccagggttccttgcagcgggcccaattttaggcagagggtttaaatagcttatttattattttgtataatctggcgtacattgtgtgctcctgcacgtgtcgtatttcatggtctgcagtttctaatgtcatgtgggtttcaaaacctgtgtttctctggtaatgtactagcagcaggtaagctcaaaataccatccatcaggagctaattttttatccagatactccaatgactgatgaacctgtcttttgtatgaatgtttagcacagtggaaagccatatgccactggcaccgtttcctctgcattccttacagttgctagagagtgggcttcctggggggcggggcggctcgatgctgtgaacgtcccctggcctctatttcaacgataacacctttaaaacagccctgggtttgggcaacaaaaagaggatgggctgtcttaaaggagacctgactccctcgtcattttctttatcagaaatacgactgcacactcttaatagggaaccttgttttgttactccccgtctgttccaaacagacctcagcccattagaagggcctcccttgtgtgggagaccacagctgttactgtaaatctcatccactcactgtatcacccccattttgtggctctgaaggatgaaattgagaaatggaatactgtgcagtcatcctttacatctccaattttaggcctttgccatcattttcatgcttttattccaaatcaaataacattagtgagctacaccaccttctgatgaatatctggtcttgagcaccgctttcaagcctgtgcttgtgggggcttccttttatgtttggtggtcttttttcccccgttctcttctttttcttcctgcactttctttgagcgttcttcgtggtcatggcagtctgcagtttgaatgatcggcattgccaaatgtgtccctgtcttagcatgttttctgagagggggcatgtgcgggagaaggttctctgtcttttaatctttgtggaaggagtgaagagaacttggtagaaggatattgggggctttaatcagaaataagaagtggtttaaatcattagcacaacaaagcatactataagcttgaagataaaagtctctggggaaagagtcctctgaaaataaatggaacttgatagatttccatatcatttataacttcccttaattacacttggaagacttgccagtaaaactggaaaattggcagcctatatccattagagtcattttgccgaccatggcaagcagctggctttacgggatttgattcccatcactcacaattcatcatcagctggaggtgtctgcagctcttcagcacagagcaatgctgggtgacactcgggcccccacgacatgcgaaaatctgctgagtaaatgggccgaggtttctctcaagccttgtttggggcaaggccgactcctgcttaatgagtgccgctctgataatcggatgcgaacgtgaaccttgacctcgtgtcaaaggagaggacgcaataagctggatgaaagatacaggattcaggccttcaaactttacaccaattagacagggagcggggagatacatcaggcccactaggttcatcaaaaagacttgtgaggcttgtgaccattttgtaagcccaacattggagacatcctgtcacaatcattaagtctttatcagatgattcacaaaagtgttggagaaacgtgcgcacacatcctgcaggaacgggccccgcacatgggggcgtctgatggagacggaatggtggagggccctctctgtgcacccaattaatgcttggcttcccagccaccctgggcaatccggaaggtgttgcttccattgggcccactgcccagctccctggtgtaccctacatgtactctacggtgtgcgacacattctgcaggagtcagcgctgctgggagcaaggctccaaagtcctaaggtgagagcccctgctcccaagggccgagtgctggcattttgctgttgttggaaggagcccagctcaatgcccagccatccctggagcacgccctcgagtgtcagcctcttcccacagactggggcaggtgtagtttgtgtttccattgcattctttgacatttggtttgtacatttggttctccagctcaattttttccaaaggatgaaacatgttgaaattcaattaagctcgtgtgtgtgtgtgtgtgtgtgtgtgtgtgtgtgtgtgttggggtagaacatgtttctgttgagcaagatgtatctcactattttgtaaggcatgaaggaagtttttaaacaccatctcttagggatgaattagggaaaacggtctacaaaacagatggtgcaaaattaatagagaagtgtgctacttagtttttcatttacagctaaataatctaggctgggcacagtggcacacatctgtaaccccagcactttgggaggccaaggtgggcggatcacttgaggtcaggagtttgagaccagcctggccaatgtggtaataccctatctgtactaaaaatacaaaaattagctgggcgtggtggtgcacacctgtattcccagctactcaggaggctgaggcagaagaatcgcttgaacttgggaggtagaggttgcagtgagctgagattgtgccgctgcactccagcctgggcaacagaccgagattctgtctctaagatagatagatagattagatagattagattagattacataagatagatagatagataaaatagattagataggatagataggatagaccgagattctgtctctaagatggatagatagatagatagatagatagatagatagatagatagatagacagacagacaggcagataagatagataggatagagctaaataagtagactagtagacaccacgagaggaactagggaggggaaacaggaatgaaaggcggatggagcagggaggatctaattctatgattcagtgctgtgcttggatggggcagaagatgggatcgcttcagtggggacacgccttctttaaagtcctttgaattgaattgccggactctcacaatcagacagaaggactatttgaatttcaggcctccccacttttcctgattgtctcgggctaaatccgaggtttttttctgatgaacaactggggacccagcacttgcagttacctgtgcgttacctctttgcaaatcacccacattagaagcacagagccagccagaaagatggtcagtggcagccacagcagagccccttaagctcctgtccaccacccacttgctcccaggccctggcggggcccagagtagagctgtagccaggtcaggctggcctttgcccctagcgtgaccttgggaaatccccaggccgcatttcttcatatttgcagttgagttgctaacgcactcacttgaagatcctgtaaaacagaagcaggagctgcctgcctgtctggcccgcagattctgagcaaggggatgggaggggacgtgtggtggaagggcacacctactggcagagagggtaggggctgtgccacccatgtgaagccaatgtacttggcggggggacggggctctggccagtcctgggccctcagatgcctgcagaggaagggctgggtgggtgtttgggaggccggcatgcagtccccaggaagctcctccacctggagagagaacagtgcccagagcgggagagtggattcctcatttttggatggcatttctactatgttctgttgagtctcagatccacttcccagagagtccccggtcctgttgcctgagtgctcagtcctaggtcagagtcagtcgcagtgagtccagcttctaagaggacacggccaggcttccagggtcccctgtgtggagctggctggcaggtgtgctgcagtgaactggacctgctcctggattccctggtctttgcctgcctttgaagagagaaaaaaggctgtaaaatgccaactggagggagtgactgttctgacacccctgatgggggcctctgcattgtctctgcgctgcccctcccatccccctgcaaacagccctcgaggctgattcttcgctctccctggaatgcagatgccacgtgaaaatgaatcaaaaagggcagcgcgggcagcgcttccaggcccagctcctcagcgcggtgtctctcctccgtgccagcgccaaagccttggcatcgtctctcttcctatatttctatgccaggaagaagcagcccaccacctgaacagcagaggaaaagagtacatcggctcaggcgctccagagtgccagcaagacagcttgcgccacacgggggggccagagggggacttggagatcatctggggatttcaggaaagaacattctctaggcgcttctgaggcattggacgaatatggccacagtggtgtgaggggccaggagccccatgccaggacacccacccacaccacatagccattgccctaggaacctggacttgcccgtttcaaagactgggaggccaaagaaaaacctggccggctcaggacgctgacccatcggggcagagcgaagtgagtgcgcagcatggttttcagctgcagctcactcctgcagggaagcctcacgcttaacgccagtgggcttaacccagctcagcctggctgcccctcaggatgaaaggcaagttctgaacgcagtctgagcaaaggcccgtgggcgctcccagtctcctagcatggaatgcatgtagctctggaagtcattcctgtgtctggagggttttccggaagctgccttgtgccttgttgtgggtactcgctgtgtcttgcagaggatgggacagtggtcctcgtggcgccagggccgagctgttcccagttccccgggactatagacagaaatatgtatatttggtggtggttttttttttttggtaacagctatactgagatgtaattcacatacaatttagccctttaacgtgtacgattcggtggtttcagtcaattcagagttgtgtagttgtcaccacaatcaattttggaacatttttatcactctcaaaagaaaccctgtacccttcagcagtgactccccttccctcttcaaccccaggcaacctcgagtctgtctgtagagatctgcctattctggacatttcaggtaagtggaaaacattccaatttccgaacacctctgttagtggcagagccagactcagagatccccagggtaggccccgccgccagggtccccacttctccagggtcagggattttttttttttccaacgaggactttatgagagagagaatggcttttctctactgttcctaaagatgagcttggaataggaaacattagagattgttgctgctgttcatagacacatattttggggcatttgacaaagaatttcttaatggcttcattcctaagtgttaatgcaaaattagaatgcttttaaaacttctgcccatttttgttttccaggtagcagaaggtcaagaaatttgtgtgattgaagccatgaaaatgcagaatagtatgacagctgggaaaactggcacggtgagtccctaagtccccatcagcccaggccggccctgtgatggaggaacgcccacctttgaatcgtgggtggtttggctggaaagggccacagaggcgccctctccccctcgcttctacagaggaggacgttaggattgggagcttttgccattctgccctgatgcatccctgcctcgtagagagcgtggcttccaaaaagtctgtgctttatgttcaggtagtcaaagaacaattgttcttcaccttaatgtctttctttcaaattaaggggtctttaatttttaatgtttacatctgtcttgaaggcagttagttatctgagacttaggtgacacagcagcaaatggttttacaaattgcaaaaattaatgtaactcttcaagacaatttctctacaaagggaacaattcagttgcagatcaagagaagccaaaaccccatgtacatgtgggacttaattatttagggagaaaaaaatattagtactgaaattcattcatagtgaaacttaagtgtatttttttcttgaagatagaaaagtccttttaagcagtaacttcattattcttcctgtgactaaaaagactgaaaagatgccgttagtaggtaaatgatccttttgtgagggccgttgtggtttggaagtgtctgcatgggagagcatgatgggaagcgcaaggctggccgtgttctgcatgtggccatgccttggggacatcaggtgcaaagagagatccatcagttcataaccaggtttgcatcagagagacacacaacctctgtctcatgctctgtcactgcagaaggcaatgaaatggattctcagagaaggggcagcggggatgtcatgcctggtcccggctgggagaacagaggcccaggtgtatgccaggggctcctgagcccagcccgccggtctggaggggtgtggacagttgcactgtgctggtatggtgtgaagagtagaatgacatgatttgtggcgtttttaaggaattctttctaaattacttctttaaaaagtgaacaagaaaatgttggtttctgttcatgtaaaaattttatctgttctttgggatttaacatttgtgctgccctagtatcacgacatccatccatgatgagaacttggcctaggtgtgggggaccgagaacgtgtgtccgccgcatgccaagggccctgtgcggcaggtctgaggtgctaatgcagaaatgaccttggcctcatcagttccctgaaggggcatggtgccatgtggtagtaggtttcctgtcctcgtggcctgggtctccctcggccctcctagttggagtcttcctgtgcattctgttcacctcaccccatccccaggcctctcagttccaacccagccaagaagagcagaagtggcccgaagcccccgtgcaaagtagcaggccctggttcctacctgcgaggccacttttcctcccagagaaaaaaagttcacaaaggaaacagatcctctactctggtcatcgctgcatcactaacactgcgtcctctagtagggctgctaaatggaggcaggagcattgtggaaagcagccttttcagtccaagcagcatctgcagtggccgatgagttctaatccatttttcattttcaggcccaagcaagagcctccaagaagtcaaatgactgtctcttccccacctcaagcccctccttgctaattttaagtcagaacacaaatttcggaaagcaaaacttgataaagattgactgaaaccggtaggacaaaaaggcacagttccacccacccatggtgctggaaagggcgaccgcacagccccacctgccaaggactccatttcccttcagaaaatggaggtcaggccagggaggtcctcctcttactcagcagctgatctgactgtcgtgtgttttgttcctttttttcttttacactaagtattccattaattctcagagaacatttccacaacctcaaaaccacagagagggaggctaggggttagaactcacctggcagtgaagagcctgcctagacctgagggtgccagagcgcaggccacagcgcaaatgctccggagagtagccctcaggccagccactgtgagggtgccgaggacagaggagacgggaaaggggaggagtgagccacggccacggccaccatggcgcctccctgttcaccagggtcccttcgatgggctccggtggggtggggtggcttgtccctgtgctgctgagcttgcaggactgtgcatttttagaaatggattaggagcctgccgcctcttggttctggttactaattcttactctcccctccccctgcatttttcaaaattcaaggtgaaatctgtgcactgtcaagctggagacacagttggagaaggggatctgctcgtggagctggaatgaaggatttataacctttcagtcatcacccaatttaattagccatttgcatgatgctttcacacacaattgattcaagcattatacaggaacacccctgtgcagctacgtttacgtcgtcatttattccacagagtcaagaccaatattctgccaaaaaatcaccaatggaaattttcattgatataaatacttgtacatatgatttgtacttctgctgtgagattccctagtgtcaaaattaaatcaataaaactgagcatttgtctaaatattagtttgccctttctttgaatgaagacaatgtacacataggcgacaggctctgccagtagactaccagcatttctttgtgatccttttaagagattgatataaatgtcagtcagttctctgccttgctttattaaattagcacttgccattttttcatctgattgccttactacttctagaagtgaggccctcactcctggtgctgattttcaaaacttcctaaggaccagagactgcaaatgcagattttggcaatccctttcctgctgtgtctctatgtgggtgtactgttggtggctgactcccctggaggtcaccctgaagcttcctggttggccgggggtgctgtctccactgtttttgtttgttttgaggatgagcgcgctgcctggtcccttccccattgcacaagccagggcagtcacaaggagcttgggctgcctcaccgccctcatcaagcacagggccgccacgagctcatcagctgagacccagcgtagcctttttgtgttttttgtgaagcaagtttccaattaagcaaaagaagctaaaaataatgatcatgtttttgtgccagatgcagttagcgatcacagtctgccattaagttgaagagtaagtgagctctcccaacagagaatgaggttactaaagatcacagcagctgcattttcatttggttctgaaatccttggaatacatttcagactttgctgggaagcagaagcaagagccgtgcaccgagttgaatcgatgctgacaattatcagatggaggtgggtagtaattggtacttcgtgccttgctaaaattattttaagtgctgtttgtatttggaagctaagcttctgtcaggcctgaagaacaaattactaatgcattggctcttctttgaaaggactcacccccaaatgctctcccttcagggggcagggacggggtctggctactgagatctgggctcagataaacttccacttgaagtccgggcgctcagctgtgtctaccagcaagtgggtgttcattattttgctagatcagaatgtaaagaaccttctaccaaataagtataccaaaaaacgtgggggtcaaacacagtaccaacacttttatatctgatttcccaaaacatcgacttcaaatttaaataatctttaatatttgctgtgaagcttgatctgaaaattaggaagaatggtgctatacgcactctgatatacagcatgcttgccctgtggatcttttctacaaattctacccagccgtgtaaaatcggctttctcaggggttacaggccagaatcagtatagtagggctgctaaaatctagcggcaacaccaagtctttacactgatcctaaatatttattattatcttgagctcaaagcagagccaacagcagaaacaacacgaggaggaagaagaattaggcataacacgagttctctaaatgtcatttaggggagttaaaatcctaaatttttcttaccaggtagaa

SEQ ID NO: 435 - DNA, 229053 bp, Homo sapiens
  source 1..229053: mol_type = genomic DNA
ttataacactttaaagtattttgcacttccaaatgttgacaatgttctctaaatctgctaacctttagaatgtttccaagtttaaagtttgcttcacttttagactaagagaatattcatgtatcttatgttgctctatcttttgtaataaagtaattactacattgaactgttaaaatatataaactgcttgttaaaaataaaatagctccatgttttgtctatatcttaattatcaagtaaacaaggatttaggctttctgattatgaagacatactggattaaataatccttattcacattaatgtccttaactattcttagtacttaaaatataaacattatggccattcctttaaaaaaaaactagtgatagcttattctgatcacatttcttagtcaaactaagatgtagctatgggattctgattatgaattggactgaaattgaaagagaggtttattaataggtaggttattctcaaattattttttaaatatatctttgcataagatttacatttttcttttgactatggattatataaagattctcagtacgtgtctctgatattgcgattcaatatccatatgatttttgttgtaatatgacaatgtttggtcttgataagaaaaaagcatggatgaaaatttaacataggaataaaagatctagtggacaccgattcaattaggaatactgagttttggaagtcagagttataagttcaatacttaggtcattatgttatataacaacaagggaaaatgtcacaaatatctttattctaacagttaaagtatcagaaaatgatgaagttgttcataccacattaaaggaattttacatgtgttcagaaattttccaaaaatgtcatctgtaagtacctgataactatatatacatgtgcatatgtacgtgtgtgtgtataatatcatttaaaaaaaaacacccaagctatcctagaataaggtgaatcatatcagtcaaactaccttattttaaaactttgacattcagttgcaaatatttaataataaaaatatataagctgataaatcgttttaaataaaatgatgtaaggagaggttaagtagatcttaaagtttctaattcaattgtaatatgtttgtaatcattactaaaagaaaatactggattacacactctccaatgagatttgaaatgttctgggtcttaaaaggacataaaattgaaaatgattgcatttaacaaattgcagacggatatagattgcattttgaaaatcaacgaatggatctaaaatttacattggccacatgatgtcgctgtacaccacaaagtcttgtcaatagaagggagctactgatcactaaaagtgaaggaggaagctccattttgtcaccgcctgagagaagacagaaacggtaaagagataaatgattggaaatattagataaaatggcatgattttgaagtaagaggagagcataagaaaggtgtagtccttttgcaatggtgttttctaggagagggggcctgggagcccgggatctgcttctttggcttctgctcctcgcagcctgggaggtggggagcggccagctccactactcgatcccggaggaagccaaacacggcaccttcgttggccgcgttgctcaggacctgggactggagctggcggagctggtgcctcgcctgttccgggtggcgtccaaaacacacagggaccttctggaggtaaatctgcagaatggcattttgtttgtgaattctcggatcgatcgcgaggagctgtgccagtggagcgcggagtgcagcatccacctggagttgatcgccgacaggccgctgcaggttttccatgtggaggtgaaggtgaaagacattaacgataatccacccgtcttcaggggcagagaacaaataatatttattcctgaatctagactcctgaattcgcgttttccgatagaaggagctgctgatgcagacattggtgctaacgctcttctaacgtacacgctcagcccgagtgattatttctctttggatgtagaggcaagtgatgaactgagtaaatctctttggcttgaattgagaaaatatttggatagagaagaaacaccagaacttcacttattactgactgccactgatgggggcaaaccggagctgcaaggtacagttgagctgctgatcaccgtcctcgacgttaatgataacgccccactgtttgaccaggccgtatacagagtccacttgttagagactacagcaaatggaacattagtgaccacattaaatgcctctgatgctgacgaaggtgtaaatggtgaagtcgtcttttcctttgacagtggtatttctcgtgacattcaagaaaaattcaaagttgattccagctcaggagaaattaggttaattgataaactggattatgaagaaacaaaatcctacgaaattcaagtaaaggcagttgataaaggaagtcctccgatgtcaaatcactgtaaggttttggtgaaagtgctggatgtaaatgataatgctccagaactggcggtcacttcattgtatttgcctatcagagaggacgctccactcagcaccgtcatcgccctcatcaccgtgtctgaccgtgactcaggtgccaacgggcaggtgacttgctccttaatgccccacgtccccttcaagctggtgtccaccttcaagaattactactcgttggtgttggacagcgccctggatcgcgagagcctgtcggtctatgagctggtggtgaccgcgcgggacgggggctcgccttcgctgtgggccacggccagggtgtccgtggaggtggccgacgtgaatgacaacgcgcctgcgttcgcgcagcccgagtacacagtattcgtgaaggagaacaacccgccgggctgccacatcttcacggtgtctgcgcgggacgcggacgcgcaggagaacgcgctggtgtcctattcgctggtggaacggcgggtgggcgagcgcgcgctgtcgaactacgtgtcagtgcacgcggagagcggcaaggtgtacgcactgcagcccctggaccacgaggagctggagctgctgcagttccaggtgagcgcgcgggatgcgggcgtgccgcctctgggcagcaacgtgacgctgcaggtgttcgtgctggacgagaacgacaacgcgccggcgctgctggcgcctcgagtgggtggcactattggtgcagtcagtgagctggtgccgcgattggtgggtgcgggtcatgtggtggcgaaggtgcgcgcagtggacgccgactcgggctacaacgcgtggctgtcctatgaactgcagccggcagcaggcggcgcgcgcatcccgttccgcgtggggctgtacacgggcgagatcagcacgactcgtgtcctggacgaggctgacttgtcgcgctaccgccttctggtgctagtgaaggatcacggtgagccggcgctgacagccacggccactgtgcttgtatctctggtggagagcggccaggcgccaaaggcgtcttcgcgggcgtcggtgggtgtcgcgggcccagaggcggcgctggtggatgtcaacgtgtacctgatcatcgccatctgcgcggtgtccagcctgctggtgctcacactgctgctgtacacggcgctgcggtgctcagtgccgcccactgagggtgcgtatgtgccgggcaagcccactctggtgtgctccagcgcgttggggagctggtcgaactcacagcagaggcggcagagggtgtgctctagcgagggcccacccaagaccgacctcatggccttcagcccaggcctatctccaagtcttaacacgtcagaaagaaatgaacaaccagaagcaaatttggatctttctggtaatgtaagtccaactttcgagttttggctttaaatatttttcatatttaacttgtctaatcatcttttcaaatatcactttaaaaaatgtcttcaaggtgttcactaacgttgaaataaatcataccattgaatgtagatatcctattaatggcagttttgtcttgaatggaactagaaagcaaagaaaaatgtagggacaaattgtcgtatttcttgatttaaatggcaggttaaaaaagctacaatacaaggtacaataaaaggtaatgttggtcatatttaacacaatatctcaatgtagtaaaataacagtgacatattcggggtaacttattatgttatcttttctggtgaaatgtcaagccccggacaaacaattcttgacaaagttacagaaatcatctgccttccctttacgtggctaagtttcaaagtgaacaataaactgaagttttaagcaaacgtaatttaaaatacatttattggctgggggcggtggcttatgcctgtaatcccaaaactttgggaggccgaggagggcgtatcacctgagatcaggagtttgagactagcctggacaacatggtgaaaccccgtctcaactaaaaatacaaaaacattggccaggcctggtggtgggcgcctgtaatcccagctaatggggaggctgaggcaggagaatcgcttgaacccgggaggcagaggttgtagtgaaccgaagtcgcaccattgcactctaacctgggcgacagagtgagactctgtcaaaacaaaaacaaaaacaaaccaaaaccgaccaaccaaacaaacaaaaaacaccatttattgggcgatttgtttaatttctttatgaaaacatacaaccacgacttcattgtcattgtgaacaatttcctgatgccattaaccttgaattcccctgggtctagaaggcttagcattgcatgtatttgctatttcggggatccagttaggaaacacttattaagcacctcccattcctcccattcactcacaaatgttctaaaaccctttacttttttagctcattcgatccttccaacgattttatgaagtgaagactttcgtcacattttgtggataaaggtgctgaggctcgcaaaacctaagttcagtattattactaagttttcttcaaatttcccgaggatatccaaaaacttgcttgctgttaatacagttctttacctttcctaaaatgtttaaggtggcttacagtggaagaaatttgtgaaagcaaattattaaaaaatctgcttaaggtcaaagtaaaagatcaagagaaaggtgggagtcattatttcaaaaatcaagcctaggctgagtgaaaatcccaatacttaccttcctgtaagtcaatatagaagtatgaaaaaataacaataaaaggaaattctctataccatttcttcaagagagaaaaaatagcctcttcctgctacaaaatcaaggaagatttgattactgatgattgtgtaaaggttgagaaatatactgggcagcacgttttatagcagttttgcaaaacccacggaaatatccttgatgtagacatcattgtatttggtagtcattcagtcaagggcataatgttaaattttatttcctatgtttgcttctgaagttacttaaatattaaatgaatatatttttgtttgtcaaactttcaaacatacatgaatgtccccttgtgaagacattctatgagaaattaatataatttgctagttaagtttccagagatttgagttgatacagagttgttgcttagagtattgtaaaaaataggctgtaaacatgttctgtaacttttaatatattatcgtactcagccttttggcaagaatcagaaaaaaataatcttagcatcacgttgccaagaaaatgtcccagttcctcaaaatatgagacaaactttgcaggattataaaattggaaaaaatagatcagaaaatcacaaaataatttctctttccaattcacattactgtgtccccaaagcttcatttgctaacagtattaatggccaggcttaggattgcctttacatacattcaatatttctttatttagttttctaggttagttgagtgtattaacctgaaggtgaatcacaaataatagtgaattactattaaaccaaaaataaatgggcgtaggagtacaaaatttgaaaagtaatttttatgaaaaggtaattctagaatggaggaaaaaatgattgtggagtggtattgtcacttagtgtttattttaatgtaaatatgaatggatttcccattggtagttaaagttcttgctccattccaaatcttcatatagttaacacaactttcaacaggtttatctttcttcacaagatttcatccacaaactagtaaggtatcatttgagggaccttagagacttgtggtcagtgaaggatgcaaatagatgaaaatgagaaatagtttatattgctagccactaccgatattcctctgagaatgctggaggatttcacttttctgttattttgaggtagcacgattgtgtaatttcctttggccaatgaaatgtgaatggtgtgtcacttccaagcagaattatgtaactgccagtgaaagactcttctgctatcttttcctgttacagcaattacataagcactggttgatactgagacaccataaagtcaaagcaatccaggatgctgagccaacatgtggagaaaagctgtcataggaagtccccaataactacaaaggactctgcagcagcaagaaataaaattatgtttattttagaggaaaaactgaatgttaactcacaacagcatatgtattgaggtcccactgccattaagctaatatgaaccagataaattttaagaggggggcattttttttacaacaggaaatacaactgtaggagaacattattgttgacactttttactaagacatctgaccgttaagcagattagataacttgaattccatggaaaaaatctactgtgttttgatttctttttcttaaatataaaaggtagcagaagaaaaataataaactgaaatttaaaatgtcatagatattccttcttttttcttgcttagcatccactccccttgttgtttttttcttctggggtcttctagtagttttgtgaaagactaggttgaaggttttgcaagaatgagtgcttggacatgtaaacgttaagggatatacagttccatagataggtgcaaagggtataattttagcaatgggtactatattaatttccttgggctgatgcaacaaattaccacagacttggtggcttgaaataacagaaatttattttcttacagagtctctgtaagaataaatttcttctctcttatggaggccagaagtccaaaatcagcgtgtttcctgggccgcatttcttctgaagactttaggggaaatttttttcttggatcttccagcttctggtagctcttggcattgcttggcttgtggcagcataactccagttcctgcctctgtcttcacatttccttctttcctgtgttactatatgccttctctttttctgtcttttataaggggcaaccatcattggatttatggccttctgtaatctaggatgatctcatatcaagatcctcatctttgttacatctgcaaagacctttattccaaataaggtcacttatttaaacctcagaaaagtgatgtcttttggggtatctttgacccaaaacaggtaccaagagatatcaagtgcagtgggaggaaggatatttgctgagcatggcttcttaatctcttttccccgttgtgggggaaatgtacttgcatatctggcaatagtattctatctccgggggaagggggaaatattccatattctcagaaatcctaaataacagcacaaaatgcctcttatacccccacatatgtcattctgaatatccggtataattaattaccttatatgattgcagaaattgtctcaagcaagccatgtttcctgaagctagcatctggattctaggtataattccttctatgtgtcaacagtggtcaatgttggctatagattaaataataattactgggtatcatacatatgcaattgctttgcaactacataatgctgtaacgagcagttctgaagctatctgccatctgtttaagctccaggagaatttgggtacatgccatgacctccacttttcagttcacataaaaaccaacctcccacttttcagttcacataatttaggtggagctgatttcatttcctggcttcaagaatgagcaagtggacccatgtctagccaatgtgagaaaaatcacaattattgactaaaggaaatttacatcatccaaactgggctgtaggaagtaatatccaggatttttgctggactattagaaaagagcactttctggtaagagtcatcaaactggtaatttttagtctagaaagctactttggccattttgccagcagatgggaaaagtctatctgagaagaagttcagcaggggaaaaggaattataaatgtggagattattttccttatggaattatggaagggtgtagacccagctctgtctgaaaccagtaattaattacccatttccatgtatgagtcagtacaggattctctggtttatttttgcttaaatcggttaacttgggatttactgttagagtatgattaacataaatacacatttccatagatggtacaaatgagtatcttaagatactgtacatgagggaaaaaaattgttattggaaaaaaagctagcttttcttaacaagagctttgcttttctcttacggacattgcaaattttgcaattaattttacttctctctttgctctaggaagctgaaaacaaaattggtgacatggttagagtaactgaaggtgaccctttattatggattttgtatgctatcccactccttgattcattttatttcatcctcatcttatctttattctattttcatttttttactgtgaagggatcagctaaaaattaacaaaagaagatattctcaagtaattaacacaaaaaaagagatcgattgtattgttcttgcataaaagtctaaatgtaatggaaaaggaatattctaaagtaatagtacattatccaaatgagaaacaaataaattattaatttcaaaacatttgcaaacaattcaaaaatcaaaattaaatcacaaaacaacagtatatatacacatatattttcaatggactaaaatacctttgattactatgttcttcatttgaagaaatagtgaaaaatgctaatatatccaaaagaattgaaagcagggtctcaaagaaatatatgcacacccatgttcatggcagcactgttcacaacagtcaagaaatggaagcaactcaaatgtccacgaatacttgaatgaataaacaaaacgtggtgtatacatatgttggactattattcagccttaaaaaggaaagaagtcctgtcacatgttacaatatggatgaaccttgaggaaccatccacggatgcttgaatgaataaacaaaacgtggtgtatacatacgatggactagtattcagccttaaaaaggaaataaatcttgtcacatgctacaacatggatgaaccttgaggacattgtgctaagtgaaataggccagtcacaaaaagacaaatactttacgagtccacttacacgaaatatctaaagtagtgaaattcatagaaatagaaaataggactgtggttaccagagactggagtgacggtgaaaagcggagttgttgtctaatgggtatagagtttctgttttccaagatgaaaaatttgtaacaatgtgaatatacttaacattactgaaatgtacatttaatcatagttaatatggtaattttaaatattatgttgtgtgttttttaaccagagtaaaaaagggtaaaaaggtaatatattttagggcttaaaatagttatttttttccaagatgaaagctatgagtaaacttaaaccagaaaatcgactagttttaaatctacagaataaacagtagagccttccttttagccacatgatgtcgctgtccaccatagagtgttctctaggaaggaaaatacccagagcccctttgttacttcagagaagcggaggaataagagaagcagcaggactttaacagagactagaatatttaaatttttgcaaaacatgctcttctaatttgatcaaaacattgaggattggtaatggcgtcttctatcagaaggggccgaggggcctggacacggctgctctcgcttctgctcctcgcagcctgggaggtggggagcggccagctccgctactccgtccccgaggaggccaaacacggcaccttcgtgggccgcatcgcgcaggacctggggctggagctggaggagctggtgccgcgcctgttccgggtggcgtccaaaagacacggggaccttctggaggtaaatctgcagaatggcattttgtttgtgaattctcggatcgaccgggaggagctgtgcgggcggagcgcggaatgtagcatccacgtggaggtgatcgtggacaggccgctgcaggttttccatgtggaagtggaggtgaaggacattaacgacaacccgccaatatttccaatgacagtaaagactatccggtttcccgaatcaaggctgcttgattctcggtttcctctagagggagcatctgatgcagatataggagtaaatgctcttctctcctacaagctcagctccagtgagtttttcttcctagatatacaggcaaatgatgaactaagcgaatctttgtctctcgtgctggggaaatcgctggacagagaggaaactgctgaggttaatttgttactggtggctactgatgggggcaaacctgagctcacgggcaccgttcaaatacttattaaggtattagatgtaaatgacaatgaaccaacttttgcccaatcagtttacaaagtaaaattgttagagaatacggcaaatgggaccttagtggttaagttaaacgcttctgatgcagatgaaggaccgaacagcgagattgtgtattcactcggtagtgatgtgtcctccactatacagactaagtttaccatagatcccatctcaggggaaatcagaactaagggaaaattagattatgaagaagcaaagtcctacgagattcaggtcactgcaactgacaaaggaaccccttcaatgtcaggacattgtaaaatttcattaaaacttgtggacatcaatgataacacaccagaagtctcaataacgtctctctcacttcccatctcagagaacgcttccctgggcactgtcattgctctcatcacggtgtcggatcgcgactctggtacgaatggacatgtcacctgctccctgacgccccacgtccctttcaagctggtgtccaccttcaagaattactactcgttggtgctggacagcgccctggaccgcgagagcgtgtcagcctatgagctggtggtgaccgcacgggacgggggctcgccttcactgtgggccaccaccagcgtgtccatcgaggtggccgacgtgaacgacaacgcgccggcgttcgcacagcctgagtacacagtattcgtgaaggagaacaacccgccgggctgccacatcttcacggtgtcagcgtgggatgcggacgcgcaggagaacgcgctggtgtcctactcgctggtggagcggcgggtgggcgagcgcgcgttgtcgagctacgtttcggtgcacgcggagagcggcaaggtgtacgcgctgcagccgctggaccacgaggaagtggagctgctgcagttccaggtgagcgcgcgggatgcgggcgtgccgcctctgggcagcaacgtgacgctgcaggtgttcgtgctggacgagaacgacaacgcgccggcactgttggcgcctagggctggcaccgctgctggcgcagtgagtgagctggtgccgtggtcggtgggtgcagggcacgtggtggcgaaggtgcgcgcagtggacgctgactcaggctacaacgcgtggctttcgtacgagcttcagctgggtactggcagcgctcgcatcccgttccgcgtggggctatacacgggtgagatcagcacgacacgtgccctagacgaggctgactcccctcgacaccgcctactcgtgctggtgaaggaccacggcgaaccagcgttgacagccacggccaccgtgttagtgtcgttggtggaaagtggccaggcacccaaggcctcgtcgcgggcgtgggtgggcgccgcgggctcagaggctacgctggtggatgtcaacgtgtacctgatcatcgccatctgcgcggtatccagcctgttggtgctcacggtgctgctgtacactgcgctgcggtgctcggtgccacccaccgagggtgcgcgcgcgccaggaaagcccacgctggtgtgctccagcgccgtggggagctggtcttactcgcagcagaggcggcagagggtgtgctctggggaggacccccccaagacggacctcatggccttcagccctagcttatctcaaggtccagactccgcagaagagaaacagctctcagaatcagaatacgtaggaaaggtgagtcttttactttttcttgccaattctaaaattgttctttttaaaaaattctatatgatttctactagttatttagattcatagttcttcatttattttatatcatcctaccgtgcgattttgaatatgaattagagatcaatttattgcatttactgaacaatttatttaaacaatctacataactgttttcttatttttacattttggcacttccatcattaagtcataagtaatagaccatgaaacactgaaaaacacctcagcaaaatttgtaaattaaacatttcccataaatattttctctcttaaaaattgaaaatcacaatcggaagaaattaaagaatttgattatataatacgtattttcaactgacactgtctatccaatctgtcggatagtgtttggaataacctatatcctggacatttcttagattgttctttggatcaacaatgcccttgtctatgcaatagttaataagctacattttttttttgtttgtttgtttttgttgagacagtcttgctctgtcacctaggctggagtgcagtggtgtgatctcagctcactataacctctgccacccgggttcaagtgattgtcttgcctcagcctccttagtaactgggattacaggcgcccaccaccacgcccggctattttcttttttaaattttttatttttagtagagacggggttggtctcaactaaatgttggccaggctggtctcaaactcctggcctcaagtgatccaccctcctaggcctcccaaagtgctgggattacaggagtgagccactgcacctggtctttttatttgtatttgaaagcagcctgagtggatattttaacaccagaatttccaaaagtatgtagcacaggttgttacaacaaaatgacagcacttaggaataactgctaatcttaagtatgttttttataagtaaaataacccattatttggtataaagatttcacactgataacatttttgagttatcaggcaaaaatagagagtattgagaaaagagaccctctcaattttgtttaatttgaaaatattaacatttaaaaatcacactggggtttttcaggtggtgggactttttcttcatttaagtggagactacccagtctttatgttaatggttgataaatcatcctttcagtatcattatcattaggccaatgtgtgcaggcctcccactgcagagattgactacttttttctggcatctaattctatgcgtgggaatacattttccattaatgtgagctcactcaattttacctggaagcatccatattcctaatgaaattggaatttttccaaaagatgaggcctggtcttggatgactacattttcacttgaaacatttattttgggtaattataacactgaactcgacaagtaaatgttacacttggaaagaacttttttagcttttccaaccaaaggcagatgtattgcaataaaataactgtcttaaacggtcctctactatttagttcttagttatttgctgtttattctaaatatatgtgcatattgataaatcatagaaataacttccactagtgatcttacctttagccatttcatagttaggtcagaatatccatttccaagtaatacttgaccactatgtttctaccataggtaaatgataagcttctaaaattatattcacatatatccaaatctccaggagtcacaatctgttgctctataagttttttcaaaacattcttatttacattttttcttggttgtctaagtgacatctaggtggtagtagaaattattcactgatactttatctacaaaatggctcaatcttctaaactcatagttcctttaatattacctttatctcttaataatcagtatggagtctactctgctataaattctcatgtgacattccattttgcaattagtataactcttaaaggtactgaaaagtgcagtattacaataagttgtcaaaggcatctcattactatgaagtccatgaagtttaaaaattttaaatttatctcttattttcaaactagctaccatctttaaaaattcagcaaagtggtaactggaatattaatagctataattatttcttaggtccatgcttttcagaaataatgcttaaatgtttacttacttcttcataatatagcacaatataatcatttagaaattatgtaagtttgatattaacaaatatcattaacttacatttttatttatcttgcttgaaaaagttaattcaaaatattaatttatttattcatgaaaacaacaattgataatttatcctattctaaatatgaatgataaaatctgagtaagttgcagtcctggcttccatttcatgaatacacaggaaacaaaagctgaaatgaaaacttttcccctaaatatttaaatcacatgtttgatttcatttttaaatggtctgggtataagcaaaaatttgtacattattttatttctctaaatttgacctctttccataaattttctttgccccacttccaaatgcggcgagaattcatgcttctcattgaattcacagatatctttagaatgttttattgcttagtgttaaatatgttgagtaaatactggcttatgttcctaggttacttttctcccttcactgtttagttaaataatcaattctttcaagtaacaacttttaaaaaaactggaatctagaaattcatcaggagtggagatcatcaaaaacgtaattactttatattgttaacattttagtatatacaggtaaattcaaatacataaagagtgtggaaaaattaaacctaatatattcttaattgatgtgatgtgagtgtaacaaatatacaaatcacattcccacaataggaaacaaatttcctgtttgaatttctctgtaaaggaccgacttctgaaatctttatgtaagttacagtcaagacagttgatgaggctatagttcttgaaaaaggggcatgggagggaattacagacattctacaaatttaaaaaaccataaatgtacatattttaagaaattaacagttgctgtaataacataaaagtagatatatgtatgttttaatatatacagcacacacacacttttaaatacttcaacatctcaatgttttgatgatcataaatctgaaaggatctgatttttctataaaatgtaacttgggtggtaaagaggttaatggtaagttgtcttgaatcagattgaaatcccatcgtaccaagagataatatcgttttacttaacctctatgtgtttataaaaagcgaataatattaaaacttatttcagaggattgtgataatttaacgggataattccattaagacaaatagaaaagtggctgtcacatgggaaatatttccaatagatgtccactgttaaaacaggaatcacaatattttagtgtatgtcatgaattagcacaattgatagtgaattagtataaaagttctaaggaaatatttagataaaatataaggactttgaggagtgaccgaaggatattacaattgaaactagaaattttgggaaagttcaaacgacatacaaggaaaagaagatacgtttacatatttaatacttacacgtttagccacatgatgtcgctgtccaccacaaggtctttctccacaaaagaaataacagcgtgcattacgtattcagatactgctttgcttcatcctctctaaaatttaacaccgaggagtttaagaaatgaagataaggaactcgaattatttttaaactttggatcaatgtaaaggcaatctaatatttggaaaatacttgcaatgttgttctcctggcgagaagatcctggagcccagtgcctgctgctttctcttctgctcctcgcagcctcggaggtggggagcggccagctccactactccgtctctgaggaggccaagcatggcaccttcgtgggccgcatcgcgcaggacctggggctggagctggcggagctggtgccgcgcctgttccgggtggcgtccaaaagacacggggaccttctggaggtaaatctgcagaatggcattttgtttgtgaattctcggatagaccgcgaggaactgtgcgggcggagcgcggagtgcagcatccacctggaggtgatcgtggacaggccgctgcaggttttccatgtggaggtggaagtgaaggacattaatgacaacgcgccagtttttccaatggctgtaaagaatctgtttatttccgaatcccgacagcctggctctcggttttcgctagagggcgcatcagatgcagatatcggaacaaattcgttgttgacttacagtcttgattccactgaatattttaccttggacgttaaaagaaatgatgaggaaattaaatcccttggactcgtgttgaaaaaaaatttaaatcgagaggacactcctaagcattatttactaataacagcaattgatggtgggaaaccagagctcactggcacgactcaactaaagatcactgttttagatgtaaacgacaacgccccagcgtttgagaggacgatctataaagtcagattactcgaaaatgcaccaaatggtaccctagtggtgaccgttaacgccaccgatttggatgaaggagtaaataaggatatcgcgtattctttcaatacggacatgtcagcagatattctgtcaaaattccatttagatccagtcaatggacaaatcagtgtaaagggtaacatagatttcgaggaaagtaagtcatatgaaatccaggtagaagccacggataaaggaaatcccccaatgtcagatcactgcacagttctactcgaaattgtggacatcaatgataatgtacctgagttagttattcaatcactatctttacctgtattagaagactctccacttagcacagtcatcgctctgatcagcgtgtccgaccgcgactcaggagtcaatggacaggtcacctgctcgctgacgccccacgtccccttcaagctggtgtccaccttcaagaattactactcattggtgctggacagccctctggaccgcgagagcgtgtcggcctatgagctggtggtgactgctcgggacgggggctcgccttcactgtgggccacggccagcgtgtccgtggaggtggccgacgtgaacgacaatgcgccggcattctcgcagtccgagtacacggtgttcgtgaaggagaacaacccgccgggctgccacatcttcacggtgtctgcgcgggacgcggacgcgcaggagaacgccctggtgtcctactcgctggtggaacggcgggtgggggagcgcgcgctgtcgagctacgtgtcggtacacgcggagagcggcaaggtgtacgcgctgcagccgctggaccacgaggagctagagctgctgcagttccaggtgagtgcgcgcgatgcgggcgtgccgcctctgggcagcaacgtgacgctgcaggtgttcgtgctggacgagaacgacaacgcgccggcactgctgatgcctcgggtgggtggcatcggtggcgcagtgagcgagctggtgccgcggtcagtgggtgcgggccacgtggtagcgaaggtgcgcgcagtggatgcagactcaggctacaacgcgtggctttcgtatgagctgcagcctgggaccggcggtgcgcgcatcccgtttcgcgtggggctgtacacgggagagatcagcacgacccgtgccctggacgaggtggacgccccgcgccatcgcctactggtgctggtgaaggaccacggtgaaccctcattgaccgccacggccactgtgctggtgtcgctggtggagagtggccaggcacccaaggcctcgtcccaggcgtccgctggcgccacgggcccggaagctgcactggtggatgtcaacgtgtacttgatcgtcgccatctgcgcggtgtccagtctgttggtgctcacactgctgctatatactgctctgcggtgctccgcgccgccaaccgaaggcgactgtgggccgggcaagcccacgctggtgtgctccagcgcggtggggagctggtcatactcgcagcagaggcagcagagggtgtgctctggagaggggttgcccaagaccgacctcatggcttttagccctagccttcctccttgtccaattagccgggatagagaggagaaacaggatgtggacgttgatctctcagccaaagtgagtaatttttatttattctttccaaaatgtctttgtttttcattcctcaatgtttccactcctctggaaatacattaatagttaagtatgaattatgtgattcataattagacttttccagttttgtggttttgtggttaaaacggtaagatttttgttgctaatttttgaaccaaatcagcagtaagttatgatatccacacttgtaattttgttttgttattaggtgcagtagtagaattattttattgctaaatgcctgggtataagacaaatattttttcttagatgaattgcattatttagagaatctgacttcgacttgttttatacttatccctatacaatgcttcttcaatatcttttgccacttttcatttggacttcctactacctgttagtacaaatgttacttgctcattttatgagttcacctaatgcttataactccctattgattatgcttttccaccttcagtttcaaaaattagatcattacacctgttgtcttttatggaacctcttttattctcttattcacttgtttggagtctcaatccttattttttacttgaatatgattcattttaggccttgtgctctaatttggcaataccgtttattgtttcttgatttcccagttgggaaaaaaatcgagaataacaattgcatttagaattgcatctttgttcatctttagtttatcactactttatttaatactactttaataatactactgtattatatgttaaaatttattactaataactaaaatatcaatatgaagtgaaaatttaatagttgtatagtatatttatatattcattttaaaagaatgttttaaatcttgttaaaaataattttcaatctgaacaatatcttgaaaataattatggtatctaattttaaaactatccctactagcaaaactttttattcattagtgtcttttgcataccatactaaggatgctaatatgaaataagtttgataagccaatgttataatgttattactggttaacttctctgaatagcatcctgcctattaatgtgtgccatgcaataagtagaaaactccaaataaccagaaccaaatgaaattgaaggtagacttttttctaatcactacccctacatatttggttatctcctctagcaattagttggactcccatttaagtttccctaccactggagagaaatagtaaccaactgaaacctggttaatactcattgacagtgtgggaggtctaacacgtaaaatagatatttttcttgactcctctccttcccctcacttccattttctttatttccttttttggcactatcctttgttgctcccttgtccatgaagtagtagccatagtgtgtccatctcaggtcagtattttaaaaatttagttctgttatcagcttcttgaatataatagagtcagccaaagtacttgtcttcccagatatggaacttcaatcttcaaatccagcttgcctcttgaaactattgtctaacaagactcttggcaaagacattttgaagactttggaattttcacttcacagatgtactgatgctatgccaaataaatattgaatagctaccaaataaacattgttttctattctgctgcattccccatctgtacattaaaatacctggtaaatgaaaatattacaaatgaaatgggtgaaaatggaattcttcctccttttttccaatgtgcttgatgtcaatgatcattttgtaaaaatatagtttgggtccccacatagtgaaagtactctggtttctgtttgattcagaaatttggtgggttttttgttgttgttttggtttttgtgtgtgtgtgtttgtgtgagtgtagttcttcaatagagagggagcgtaaagctattttcactagattgattttttgtttagacaaacaggatgaaaataactttatggatataggaggcaaggaaagtttttaaatggctaccattatgtctttatatattaaatttctttatgtaagaaaatgtattgtggtttatttattgggaagtcttcattccccattaatacccaggatgattcaaagatcatgattaccaagaattagaataaaaattaagctaaaacccaagttttcaacattgaacttgaaatacatcttaattggggaaatgtctagagactttttttgtatctttagaaaatcatagaggctattgaaacaccacattttcccaactagatatgcgatcaccttaaattaatgcattttattaggcaatggaaggaagcaaacattttctgcagggtaaatatttaggaaatattaggtaagtccctctgagctattaaacaattaagatacaactattccctttaaaatatatattccaaaaaaggacacacatactcaaatgcttataagagataaattaatgtaataaatggcccacgcgattccaccctggtgctgcagtttgtaaaagaagaaaaaatacctgttcaattggtttgatcatgacattcttcatgggtcagggaagttttaagtggttataaaatggggtaaattggctttagaagagtttagaaatgatgtggattacttatagacaggacaaaatgaacatgcttgtttattaaaaaaagctattggaagcaggaaatattcagtttggctaaaatatataagcactataggagaaaatagaagcttaggcacattacatactggagaacaagcaagtacttataaactgtaagagtcaaaatgagaataccagcgtttctcatgggagcaaatgagttccaatgaataaaattatttggaatgcttttccatgcaagctatttgctataacttcctgcttccttgcactttcagccctgacatgactcaaggaagacatctaattaaatgctgatggtctttgatccttttataaaacatctgcaaatttccctgtcaatagcttgttcttggcaccagaagttccctagagaccagtcccctcaagtcaacaacaccagaaatactagggtgaagagggtgttatcattaataaaaaaaaaccctggaattcttgggaacacaggaatctgtaatgaatttttctaatcaacagtttacagttacatgtttacaaagtgtatagttaggtctctgtaatacttaaaacctgtgttgaaaaaattatttctactgaagtaaaagttgcccctatggcgaaactaaggaccacactcaatcaatcagtggtacaatgtgtaccacagtagtacaaaatgtattcctattctccgaaacgactgaaataataaataaaaccaagtagtttacagtagagtgtgtgggggtttccacaattgctacttacggtttggagccacatgatgtcgctctttaccacaaaatacatgagagaaggaggaagaagggaaaattccttctattcttactggaaggaaccatatacactctttggagtctgaaatatggaggatgcagctgcacttgactgaccgattaaaagatttcccttgactttgagaaacgatatttaatcagaacaaaatactgtgcactaaagatggagttttcctggggaagcggccaggaatcccggcgtctgctgctcttacttcttctcctcgcagcctgggaggcagggaacggtcagctccactactcggtctccgaggaggccaaacacggcaccttcgtgggccgcatcgcgcaggacctgggactggagctggcggagctggtgccgcgcctgttccgggtggcgtccaagggccgcggaggccttctggaggtaaatctgcagaatggcattttgtttgtgaattctcggatcgaccgggaggagctgtgccggcggagcgcggagtgcagcatccacctggaggtgatcgtagacaggccgctgcaggttttccatgtggacgtggaggtgagggacattaacgataacccgccggtgttcccagcaacacaaaagaacctgtccatcgcggaatccaggccgcttgactctcggtttccactagagggcgcctcggatgcagatatcggggagaacgccctgctcacttacagactgagcccaaatgaatacttttctctggaaaaaccacctgatgacgagctggtaaaaggtcttgggcttatattacggaaatctttagacagagaagaagctccggagatttttttagtgctcacagccactgatggaggcaaacccgagttgactggcaccgttcagttactcatcacagtactggatgccaatgacaatgccccagcttttgacagaaccatttataaggtgagattactagaaaatgttcctaatggaacattggtaattaaacttaacgcctcagatttagacgaaggattgaatggggacattgtttattcattctcaaatgatatttcgccaaatgtgaaatccaagtttcacatagatccaattactggacaaattattgtaaagggatatattgactttgaagaaagcaaatcctatgaaattattgtagagggcattgataagggacagctcccactttctggccattgtagagttattgtggaagtagaagacaacaacgataatgtcccagatttggaattcaagtctttatcacttccaattagagaggacgctccactgggtacagtcatcgccctgatcagcgtgtccgacaaagacatgggtgtcaatgggctggtcacctgctccttgacgtcccacgtccccttcaagctggtgtccaccttcaagaattactactcgttggtgctggacagtgccctggaccgcgagagcgtgtcagcctatgagctggtggtgaccgcgcgagacgggggctcgccttcgctgtgggccacggccagtgtttctgtggaggtggctgatgtgaacgacaacgctccggcgttcgcgcagcccgagtacacagtgttcgtgaaggagaacaacccgccgggctgccacatcttcactgtgtctgcgtgggacgcggacgcgcaggagaacgcgctggtgtcctactcgctggtagagcggcgggtaggggagcgcgcgctgtcgagctacgtttcggtgcatgcggagagcggcaaggtgtacgcgctgcagccgctggaccacgaggagctagagctgctgcagtttcaggtgaccgctcgcgatgccggcgtgccacctctgggcagcaacgtgacgctgcaggtgttcgtgctggacgaaaacgacaacgcgccagcactgctagcgcctcgggcgggtggcactggtggcgcagtgagcgagctggtgccatggtcggtgggtgtgggccacgtggtggcaaaggtgcgcgcggtggatgctgactcgggctacaacgcgtggctttcgtacgagctgcagccggggactggtggcgcgcgcatcccgttccgcgtggggctgtacactggcgagatcagcacaacgcgtgccctggacgaaacggacgctccgcgccaccgcctactggtactggtgaaggaccacggcgagcccgcgctgacggccacggccactgtgctggtgtcacttgtggagagtggacaggcgccaaaggcctcctcacgggcgttggtgggcgctgtgggtcccgatgctgcgctggtggatgtcaacgtatacctgatcattgccatctgcgcggtgtccagccttttggtgctcacgctgctgctgtacaccgcgctgcggtgctctgcgctgcccaccgagggcgcgtgcgctccgggcaagcccacgctggtgtgctccagtgcggtggggagctggtcatactcgcagcagaggaggccgagggtgtgctctggtgagggcccacccaagaccgacctcatggccttcagccccagtttacctgactctagggacagagaagatcagctgcagacaactgaggaatcctttgcaaaggttagtgtataacatccttttgtttaattttcgtattgtttttctctatcaacttcttcgtaaatttatttctaagagtcaaatttccctgggttaaaattttacctctttttacatatccattttaactaaagtcttttggaattataggacatcagagcaatatatattgccttccttcattttatgctgcattattcaatgcatattaacagaactgtaatttctagtaaattttcactatattcaccctctttgtttttggtaataatcaacattttagaaaacattttactattatttaacctattacatataaacaaatgtgcacaggctgaaataataaagctccataaattgtatgaaagtgaaaagctccgttgcctccatcgctgaagcccctcgcatgcacctgccaaatcacttcccttatttttcctccagtgtaaccgcacatttgccttttataactgtttgttcggggcctgttttgggaacgttatctaattggacttgcacaacatgtattgtctgtgcatttgtgtgttatttgtatttatcactcattgtttatgaaattatccatgttgttatatgtagttgtagtttatttatttctgtttctagtactatttcataaatatactataccttatttattctactgttcaggaatttgcattgtgcctcaatgtctatttcaaataatgccatcataaatatattgtacatttctttgatgcccatgtacacagatttctctcaggtttttgcctaagagttgtgtttgtgggtcacagaatatgtgtgtatctttgtcttttgtagctaacaccaaccaattttccaagatgtttttacctgtttacattcctagtagtgcataaggctttctgctgggccacatcatctctacatttgtcaggttattttcatgttagccattttactgggtgacttttgtaatctcattttgaaattattttatatttaaatgaagttgagtacctttctattttattttggcaatttttataccttattttgtgcaatagctgctcaaatctcctatttctctagtctgttgtttttcttttcttttttctcttctttttgcttccatagaactttatttatttccttatcttgtttttcttattacttaaacaaatcttgtattctgaacataactcctttttttagtagttttcaacctcatggctagtttttaattcttttttgtcttttggtgaatagaaagtcataattttgattaaactcaatttatcaatttttgcttctgatcctatttcacaaagataattttctgtggtatcttttatttcattgtttacattacatctacaatccatttggaatatacatatttttatcattgttgtgaggtaggggtcaagatttatttttattccttcttattatttttattatactttaagttctaggatacatgtgcacaacgtgcaggtttgttacataggtatacatgtgtgccatgttcgtttgctgcacccatcaactcatcatttacattaggtatttctcctaatgctatccctcccccagtcccccacacctcaacaggccccagtgtgtgatgttccccaccctgtgtccaagtgctctcgttgttcaattcccacctatgagtgagaacatgcagtgtttggttttctgtgcttgtgatagtttgctcagaatgacggtttccagcttcatccatgtctctacaaaggacatgaactcacccttttttacggctgcatagtcttccatggtgtatatgtgtcacattttcttaatccggtctatcattgatggacatttgggttggttccaagtctttgctattgtgaatagtgtcgcaataaacatacatgtgcatgtgtctttatagtagcatgatttataatcctttagatatatacccagtaatgggtcaaatggtatttctagttccagatccttgaggaatcgccacactgtcttccacaatggttgaactagtttacactcccaccaacggtgtaaaagcgttactatttctccacatcctctccagcatgtgttgtttcctgactttttaatgattgccattctaactggtgtgagatggtatctcattgtggttttgatttgcatttctctgatgaccagtgatgatgggcattttttcatgtgtctgttggctgcataaatgtcttcttttgagaagtgtctgttcatatcctttgcccactttttgatagggttttttgtttttttcttgtaaatgtgtttaggttctttgtagattctggatattagccctttgtcagatgggtagattgcaaaaattttctcccattctgtaggttgcctgttcactctgattgtagtttcttttgaagatttattttttactaccatttttttgttggacttttaaaatgagtttggaagtgttccctctccttcaattttttttttttggaagagtttgaaaacaattatcattgattcttctttaaaagtttggtagaattctccaggaaagatatctggttttgggcttttgttgttgttgttgttaggaggtttggattactgattcaatctccttactagttacagctttgtttagattttttatgattatgtcttggtagtttgtatgtttctaggaattaatcaatttcttctaggttattgaattttttggtatatgattttaaaagcctcttataattgtggcatcaggtgtaatgccacctcttttgtttctgacttccagtctttttgtttttttcttagtctagctaaggggcttgtcagttttgttgttttttcaaaaaatcaactaagtttaaaaacttaatttaaactttttttcatttatttttgctctaatctttattatagtatttcctccctttgctttgggcttcctcatttgtcctttttttctagttccttgagttgttaagttttttatttgagatctttcttctttcttcatttttagtgtaggcatttacaactcccttctttgtttttgttttcatgtttaagagacaagatctcactatgatgtacagaggcacgatcatagctccctgcaagtgatccttgtgccttggattcccaaagcactgggattacaggcgtgagccactgagcttgcccagcttaatattccttcttagtactgcttttgttgtatcctgtaagtttttattgtgttgtgttttcatttttgtttatcttaacatattttctaattcatcttttgatttcccctttcattcaaatgaaattttgaacagaatttcgttcaaaattctgttgtttaatttctacatatttgcagattttccagttttaattccagtattgatttctagttttattccactgtggtcagaaaagatatttagtaggatttcaaccttcttgaatttgttaagacttgttttgtgacctgacgtgtgatttatcctggaaaatgctctgagtgtgcttgagaagactgtatatttgctgctgttgggtggaattttctgtatatgtctgttagttccatttcagctatagtgttgttcaagtcctctgcttccttgctgattttctgtctgaatgttctattccttattgaaagtaggataccaaaatctcctactacagtcattggagatacattctgagaattgtatcattctgagatttcatcactgtgcaaacatgagagtgtacttacatatttacacaaacctagatagtatagcctactacagacctaggttacatgatctattgcttctaggctacaaacctgtacatatgttaactgtactgaatactatagggaattgtaacacaatggtaagtatttgtatacctaaatatatctaaacatctaaaaggtacagtaaaaacattgtacagatttttaaaatggtacacctgaatagggtacttaccctatgaatggagactgcggggctggaaatttatctgcatgagtcaatgagtgaatggtgagtgaatgtgaaggcccaggacattactgtgcactaatgtagactttaaagcactatacatttaggctacactcaatttatcaaaaaattttctttttacaggctggtcatggtggctcatgcctgtaatcccagcactttgggaggctgaggaaggaggatcacttaagcccaggagttcaagaccagcctgggcaatatagtgagaccctgtctctagaaaataatttttaaaaattagctaggtgtggtgacacacacttgtagttccagctactcaggaggctgaagtgggaggatccttgacttgaggaggtcaaggctacagtgagctatggtcgtgccactgcactccagcctgagcaacagagtgagactctgtctcaattttttttctttcttcagtaataaattaaccttagcttactgtaacttttcaactttgtaaacttaaattttttaaccttttgactcttttgtaataacgcttagcttaaaacacaaacacattgtacagctgtacaaaaatattttctctttatatccttattttacaagtttttttgacttttaatttttttatttttttcacttttacttagtgtttttttttgttgttgttgttaaaaatgaagatataaacacccatactagcctaggactgtattgggtcaggatcatcaatatcattgtcttccacctccatatcttgtcccactggaaggtcttctggggcagttacacatgcgatgctatcatctcctatgataacaatatcttctagtggaatacttcccaaaagactttcctgaggctgttttgtggtgaccttttttcttttttttttttgagttaatgtattttttataagtagaaagagtacactgtaaaataccactaaaaagtatagtaaatacataaagcagtaacatttactatctgtatcaagtattatgtactgtaaattactgtacataattgtatgtgctatcttgtacttttatataactggtagtgcaataggtttgtttacaccaacatcaccacaaacatgtgagtaatgtgctacaacattatgactgctacatcatcactaggtgataggaatttttcagctccattataatcttatgggactactcttgtacatgtggtctgttattggttgaaacgttgttatacaacacttgactttattgtattgctatctatttctccatttctgtgaatgtttgcctcatatatttaggtgttttaatgttgggtgcatatgtatttataattgctatgtccttctggtgaattgaccttttatcattatataatgtccttctttgtctcttatgacactttttgacttaaagactattttgtgtgatgtagctgtttccacatttgcactcttttggttacaatttgcatgaaatttttttaatatcctttaactttcaggctatccaggtctttaaatctaaagcaaatctcttgtagttagcatataattgggtctttaaaaaaaatcaattcaaccactttgtatcttttgattgggggagtttatcccatttttatttaaagtaattattgatagggcataacttactgttgcctctttgttaattgttgtttgcagcttgtagactttttgctcctctttcctcctcttactgtcttcctttgtgttttattgagaattgtaatgctatgtttttgttcctttcctgttttcttttgtatatcttccataggtattttctttgtggttaccatggggcttacattttaaaactcttataaaaatgtattttaaactgatagcatctttactacaatcacaaaacaaaactcattatgtttacttctcccctacccaaattttatgttattgatgtcataaatacatctttttatattgtgtatacattattttatagttagtttttctgtacttttgtcttttaatcagattttaaaatatcagattttaaagtgacttttgtaccaccattacagtattatagtattctgtttttatctatatatttatctttactagtgagctttatactttaataaaatacctatgtatttctgtttagcatcccctaattttaactcaaaaggccccctcttaacatttcttgtaaggcaagtctaattgtgatcaccttcagcttttgtttaactgggaaggtctttatctctttttcatttttgaagacaaactttggtggatttggtattcttggctggcagttctttttcttttcagcactttcagtataacatctcacccctttctggatggcaaggtttctactgagaaatctactggtagagttaggggtgttcttttgtacgtgatgaggcatttttcttttgctgctttctaaattcttaacatttcttggatcttgatgtccatttccttcctcatatttgggaagttttcagatgtaattttaaaaaataagctgtctgtccttttctcttatggcttcttcttttgaaactgtcataatgagtagagcagcctgctcgaggatgtcctatcaatttcttaggctttctttactctctttcatttcttgctctttttgctactctgtctggataatttcaaatgatgtgtccttgagttcactgactcattcttctacttgattaagtctgctgttgaacatgtctgtaaaattttcagttcaattattgtattcttcagttccaaaatttctttttagttcttttgaatattttctatctgctgaaattctgattctgcttatgcattattttcctgagctcactgaacatctttatgacaattattttgaatactttgtcaagtaattcacatagctctatttctttaggtttggtttctggaggtgtgtttgtgtgtgtgtgtgtgtgtgtgtgtgggcacgcactatttgattgggccatgtttcctgttttctcatattccttattactttgtgttgatatctatacatttcaaaaaaacaaaaaacaacaacacaccagctacctcttccagtctttatggactggatttgtacatggaaagatctttactaatcaggctggctagagattctagggacctctcaaaccttttctgtggatgcatcttctatggacttgtgtgtataattcctaattagagggatctgccagcttttttttttaagatgctctaatctttttccctctgtggtgtctgtgtgctgtactgtgggccctctggagcagcagtattcactcagctcttttaggttctgagaagccctcagttatagattctgctgaatcctatcagtgcctggagtcaagtgagacagaaacttggactgcccactaaaattcaggaactttggatgcattttactctctctttccctcatgagagagagagtgctgagctgagtttctctctgtgtgctgtatcacaggtcctgaggagcatcagcccgccacccagctctttattattctgagctgccctcaggattttagaatatgccaggttccatcagtgctctgagatatgcaagacagctcccctgaaaagtcagaacactgaatgcatgctttactttctctttcccttctcagggagaagacaggagctgggaatttccccctgtttgaatggaactgtgctgctggatgggactatagggaaagtgccccagaaaagtgcccagctagttttacacttgcttggagcccaggaccctcttaactggtttcggcacttatcaccatgggaattggtccttgtattgttgttgagttggtatacctgtggagggtctggggattcctataacagcatcttgctgatgtcactacctctgttatctttttaagctatatatgcttttacaaattattttattgatttcctcttttgttgattataacacacatccttgacttattacctcaattaaatcaataattttaataattccaggcaacgctaagaccttgaatcattataccatttacttgtaccctactttttgttactgatatgcctttcaattatttatatgttctagacacacagtacattattatcattgttttgttaacacctatatatgtttctttctgggatcattttccttctgaagaaattaacatttcctttagtgtggcctgctggtaaagaaacctttacgtttttatatatctggaaatgtcttaattttactatcacttttgagaaacagttttgggtattgaatgaaagttatttttgccagcacttttaagatgacattccatggtcttcttttgagatgatggctgtcaagtttattgttcaattagtgtgtctttttttctgtctagctactttgtatacttactctgtttttcacttttaacagctttactatcatgtgcccagtgttaatttgctttgtttttaatctcgcttgcagttttcaaagcttcttatatctgtgggttgataatattttatcagtttaagagaagatttagcagtatgccttcaaatacggcttctacttcatattttctcttatattcttctgtgactataagtacatgtatgttaaatcttttcaccatattccttgtcttttatgtgccatttctgtttttaaatcactttttctctttgtttcataatccatgttttattctgacccatcttttactttaggaattttatcttgttattctaggccactgtcaaagtcattgattgaattcttaacttgaatcgtggcatttttccattttagaattttattttcctttttaaaaatatatttctaacttgggtactggctaatgtcaaaagaaactttcctcccacaaagttttcactcacttgatcttggattttaaaatcagatataacctgagagattatcatttttctccatttaataatgaatcaggccaggcatggtggctcatgcctataatcccaacacctgtgtgggccatgacaggaggattgcttgagcccaggagttcaagatgagcctgagcaatatagggagactccatctttacaaaaaatgaaaaaaattagctagatgtggtggtgcacacctgtggtcccagctacttgggaggctgaagttggaggatggcttgagcctgaggctgcaatgaactttgactgtaccactgcactccagcctcggtcagagtgagactctttgtcacccagttgtatagaatcaactataggtagaggcataaaaaagatgcctgagattgcatctcttgaatttagcttcattgtccctttctattaagtgagattatttgacatgaacattgatattcactatctcagggatatgttagaactattctcatattttctatccacagaggatatataatatggatattttagcacattcccttatagggcagttataccttcctctgtgactcattatacaggcagcgctaagatgtgtattatatgctcatggtatcctttcttactatccttataatagaataaattaatttttatacagaattaatttttgaagaatcaaatgacatatgtgcataaattatttatacatttttatacaattgcttcaacatttcctcttctctgcaatctggtatatctatataatttctatagataagagaagaaaaatatagcttattaaaattttattctgggttttgtaaggaataaaggacatttgtacccttatgaagattaaattttcttgtgttagtatatttctaaaggcttttagtgaattaaatggagacactttaatatactacacagttttaaatctaaatttttttctcaaggaagaacttctgtttacacaatgatgcttaaacatgactgaaatatctaaaggagaggttaactggatcagtcaagaaaataatctgtaacatttgattgaagaaaatagcttagaagaagattttttaaaatgttcttttcctgtggagtctcccatgaaattcagattggataatctatagttactgagaaaggaatattcaaaataagagttgatcactgtagcacaaatgcaagtgataatttaaaaagtaaatataatttaacagatatgaaagtgaatcaaaagtcaagagtcttgtttcctcctgaaatatctatataagtacatgagatattttttccagactgagaggagcatgtgaactgatattgttgatgactttttctccattgagtatatcttttaaaatactcagtatttatcataatactctgcagattacaatgtacacattgttaatactacattgttaatttgccttttaaatacttaatatttacttttttcaaaggttatctttgtgtattttgtataaaattctactataatttattccatagctttgtagttttacattatttactgttatataatagaaagtggctaacatcagctaatgctgttttctaaatatttattatcattttcttatgtttttaaccattgtgtattaaaatatttcaaaattatcagtatgaaaactattaggcaaatagtctgggaaattgatttgtgtttcaacgatccaaatattagtgaaaagtcatgataatagagatagtaaaaatcttataagggaactggtaaatatatctttaaagattgtatcagaaacaattctatgacaatatcttgtttctttacaagtttgaattccagaaatcaagtgaatttcctctgactttgcattttctggtaatttcttttttcttatcaagctatattttaaatgtaaaagtatccaacaatagaattgctaatctcttggtccctcttgtcttcacaggtaagggatattttgtaatatttaaggaattttatggagtatatatacaagcagaatgttagctatttcttcaatagaaaacttggtgatattttcttttgcccatatttattaagtgaagtttactaaattttctaggtcgtgttcaaatcataccatccagtaaacagttgggagattaaaaagtaattaaactaatataaagatagcctggttaataaaatgatattcttttcaacatgattatatttactggaacctaaacattttgtgaaatagtatgtcatatagacaatattaggattttgacttgttatgtaagtacaaaggtatgtattttacaatttttaataattgctttatcagtaatagcaacttgaagaaatgctatctagatgcttctaatttgaaaatagtgcaaagacgatttaccaaagtcgttctattatgcttttgatttctagaaagctgaaatatccccattacagtttttgagtcaatacaaaaagtagataggtgttatagataaagaaataggttttcatcgatttgaaaattagaactccgagaagaaactcaggtaagaatgccattaaaatagttttagttgtttttgaaaataacatcaacaaaatgtcactattaaacagtgaaattggaataaaaatttgttttatgagtaacacggagatagcatacaaacattccattgactaatacagaaaaaactcaaaagttttaattagatatgtttaaatagagatgagaaaagtcaaaactttaactcttaaaagttatttttatcagtttggaaatatataaactcctccctatataaaatacaccagcacaaatttctctagtaaggattggggtttcatgactttagatgtatttttctgtaatattttaatgacgcacttatattgacgcattttaagatagagtttaatgatatattttgactagagataagtgatttaaagaataagaatcatgtcattgaaagtgagaatacttgagaaatattgacgaatataagctaaataaagcaaaacaaaataaaacacttaccctttcatccacatgatgtcgctggacaccggaaggtttttctcccttcccagcctcaaaggaatacagtgagtagattttccttagacagaaaggaaaagaaccttccatttttggctgtgccaagaagctcagaaaggcgataatataaaaaatatatagttaattgggaattgaatttacaaaatacattgtgtggtgatgcaatagaaagctcataattggaacgagattgagatggtatattcccggagaggaagtctgggatcccggctcctgctgctctggcttctccttgcctactggaaggcagggagcggccagctccactactcgatcccggaggaagccaaacacggaaccttcgttggccgcatcgcgcaggacctagggctggagctggcggagctggtgccgcgcctgttccgggtggcgtccaagggccgcggggaccttctggaggtaaatctgcagaatggcattttgtttgtgaattctcggatcgaccgggaggagctgtgccggcggagggcggagtgcagcatccacctggaggtgatcgtggacaggccgctgcaggttttccatgtggaggtggcagtgaaggacatcaatgacaatccgcccaggttctccagacaagaacaaagattattcattttagagtcaagaatgccagattcgcggtttccgctagagggcgcgtcggatttggatattggagcaaatgcacaattgagatacaggttaaatccaaacgaatattttgacttagatgttaaaacaaatgaagaagaaacgaactttttagagctggttttgaggaaatccttagatagagaagaaacacaagaacaccgtttattagtgattgcaactgatggaggaaaacccgaactaacaggtacagttcagttgttgatcaatgtattggatgctaatgataacgccccagaatttgataaatccatttataatgtcagattgttggaaaatgcaccaagtgggacattagttattaaactgaacgcctcagatgcagatgagggcatcaataaggaaatagtgtatttctttagtaatcttgttcttgacgatgtaaagtccaaatttataattaattctaatactggtgaaataaaagttaacggggaactggattatgaagactataactcatatgaaattaatattgatgccatggataaaagtacattcccattatcaggacactgtaaagtagtagtgaaactcctggatgtgaatgataataccccagagatggccataaccacccttttcctgcctgtcaaagaggacgctccactcagcacggtcattgctctgatcagcgtgtctgaccgtgactcaggtgccaacgggcaggtgacctgctccctaatgccccacgttcccttcaagctggtgtccaccttcaagaattactactcgttggtgctggacagcgccctggaccgcgagagcgtgtcggtctatgagctggtggtgaccgcgcgggacgggggctcgccttcgctgtgggccaccgccagcgtgtctgtggaagtggccgacgtgaacgacaacgctccggcgttcgcgcagccccagtataccgtgttcgtgaaggagaacaacccgccaggctgccacatcttcacggtgtctgcacgggacgcggacgcgcaggagaacgccctggtgtcctactcgctggtggagcggcgggtgggcgagcgcccgctgtcgagttacgtttcggtgcacgcggagagcggcaaggtgtacgcgctgcagccgctggaccacgaggaagtggagctgctgcagttccaggtgagcgcgcgcgacgcgggcgtgccgcctctgggcagcaacgtgacgctgcaggtgttcgtgctggacgagaacgacaacgcgccggcgctgctggtgcctcgagtgggtggcaccggcggcgcagtgagcgagctggtgccgaggtcagtgggtgcgggccacgtggtggcgaaggtgcgcgcagtggaccctgattcgggctacaacgcttggctttcgtatgagctgcagccagcgcctggcagtgcgcgcatcccgttccgcgtggggctgtacacaggcgagatcagcacaacacgctctctggatgagaccgaagcaccgcgccaccgccttctggtgctggtgaaggaccatggagagcccccgctgacagccacagccacagtgctggtgtcgctggtggaaagtggccaggcgccgaaggcctcatcgcgggcgtcggcgggcgctgtgggtcccgaggctgccctggtggatgtcaacgtgtacctgatcatcgccatctgtgcggtgtccagcctgctggtgctcacgctgctgctgtacaccgcgctgcggtgctcggcgcagcccaccgaggccgtgtgcacacggggcaagcccactctgttgtgctccagcgcggtggggagctggtcgtactcgcagcagaggagacagagggtgtgctctggggaagctccacccaaaacagacctcatggccttcagtccaagccttcctcagggtcccacctctacagacaacgtgagttttctaatattaacatccatctttccctcccaattttcaaatattaaatgtcacattcacccactttttttgtatttaaaaattatgtcttagtacacaaatattgtggtacacaattattgcactaattcatgtattatatgctttttatgaggcttttctgctggggtaatagattcatcagctttctgtgatattaagtgtttttaaaataatattttatattagcatttgaattttgcatctctaaaaatgtaggataataattgtaagacatagtttggagtcattctcaaagtttcagtttatgactacatgaaaatttattttattttattgttattttttagagaccctttgttgcttagtctgcagtgatctgatcatagctcaccgaagcctgaaactcctgggctcaagtgatcctcctatctcagccgcccaagtagctggactacatgcacatgctaattaaagttttttttttttttttttttttattttctgtagagataggggtcttgctactttgcccaggctggtcttgaactcctggtttgaagccatgctcccgtctcagcctcccgaagtactaagattacaggattgagcaagagtgcctggcctataaaaatgttttaacaccacccttccaattttgcctttttgtttctattgaatttaaattaattattattttattacactaatttagtttgttttcaattgtatttttgcagcatatggtttatttcaactttgcctaagcagttcacctgtatacccatgatgaatttgataattgtaatttaaaaattatatttttcattttattgattttttgaataggaaacacatatacatggtttactgttctaaaggtgcaaaagaatacagttaaattttccctttcacctccttcatgaagccaaaacattctctggtatccttctagagatttttttcatatacaaataaacttccctacccccttaaaaaacatatgagtattgattttaatcttgcttttttcatttactaatgtatcttgatgatcatgaattatcattactgaagtagatttgtttttcttttatctggatctatggtgttccattgtgtaggtatgtgattggttatttttcccttaacattaacatttagtggaacaatgatttaattttctggaaatttgcatatttttcaatatatctaatatatattagatatataaatatctaaaatatctaatatatatctaatatattatatattttatataatatatataataaatatataataataatatatatcagatattttgatacagaattttgctcttgttgcccaaacgagtgcaatggtacaatcttggcctcccaggttcaagcgattctcctgccttatcttcccaagtagctgggattacaggcatgtgcccacacctggctaattttttgtatttactagagacggggtttcaccatgttggtcatggtggtctcgaactcctaatctcaggtgatttacccgcctcggcctcccaaagtgctgggattgcaggcatgagccatcgcgcctggcctaaattattatattgatgaggagtaactgtgaatctcctcagttgtgcaaattctactatattttggttgggaaattttactgcttgttgttacttttagattaaaaaaataaatataccatgatacaaactcccctcttgagttgtttacaaagagttgtttattaaagctgtatgtttgagactacgctagacaggtgtcctctccatctgaaataatgagaaccatttgtctactcttttgaggggaaaagtatggatttataggtagtaaatagtccacactttacatgataaaatgtgaattccctatttctgttgctttgcctgtttcttttattctcatatgcattcaattttataagtacccttctatcatgctatttatatattcctaatatcctgagctactttgaggaagtcctagaaattgagaaatagtttttgtcattctataaatctaaagttaacaatggtcacattttaaaaaatcaagttttgtgatataaactatttatatatctctttatatatcaagtctttatgtatattttgtgcagcttgtcttttttataggaacctcttgttttggggattgtttttggttaagaaattgaaccctttgtttgcccaaaataactgcaatagaaagtcagtgataagaactactaaatagatccaggttaattattttaagatagaatttcacatggaagaaaaggctttgtgtcacaatcatctgtgaggcattttactgtatatcagaattttggagtaaggtgaagatgatcatgtcatttgaaaagtcttattggtgactctatttttctcctttgaaggaggggtttaatcacttcaaatggataacattaaggttaaattaagggcgaagttgatatttggccctgacttttatatgaaggtaacatttttgcaagtaaattgtagacgtaattaaaaaaacccagctaaaacaaaggtggtattgagaaagaggaagagcaagtggtctatattgtcagaaaaataagattcatattggagagtaattgaaaataacctgcaaaaagttgattacctaacatgtgattacatattaggttactagaagtttctcaagtgtcttgcaatttctaggtttagtaaaattcaatgaaagctgtactcataaagataaatatgatagcatgtgaaagacagatggacttaggtggatgtggaataaggcaagccagggaaaaggagtaatttaaaaagtaatataggtgacatgggaaatgctcatgtcattaaaaatatgaatttaaaaatttgaatttggggattattaataattgctcatgccttgctatttaacaaactattttctaggagtcagcatgtataggtgaaagtgacaattagaaacatagaaagaagggatgcagatatggatttgtaaatacctcaataaaagtcttattcaaaacttggaagtgagtgagaacaattaaaggaaaggatatgggacagggttgaagttgagagagaaaaacgagatcatttaggaacagctgaagaatcaaaaacagcaaagcacaatgggtagaaattccactagaatttgaagtggtgaagtatatgaaaagaaaatattttaagcaagaatcctaatataagctgcagataaattaaatgtgataaagaatatgctctagaattttatcttccatcattacacagaagaaccttaagagcatctgatatttattgaacaaagaaagcatggacttcaataatctataaggctttaaaaattcaaccaaaatttgataattttaagttacattttttccctagagcactatataatagcatgtcctaggaaagacagatgtgggcaagtttcttttctaccaagagtgtagaatagtttacatttctgatttaaaaagcagttccgttaacacttaaatttgctgaactggttgatattaatgttgcaaatattggtagaaaagttgtttagctgtgaataattagatcccttactttaaattaataaaagaagtcgggataacactgaccgtgcaaattacaaacgtgaggagggtttactataaaagtagagaaaagaagatactgttttaaaaatatatggtatagcactgttacgtgaattgatttcttaccttttggagccgcatgatgtcgctgtctaccatgaagttatagctagccaacattcaaatttcttctattactgcatcattccctgactgttgaatgatggcggacgcagaagaaatggattaataaattccggaacatacagtattttatctttatgcggaagatcttctaatggaaataaaaccagaggtatttgacatggtgtttaccccggaggatagattgggaaagcaatgtctgctcctcccgcttctgctcctcgcagcctggaaggtggggagcggccagctccactactccgtacccgaggaggccaaacacggcaccttcgtgggccggatcgcgcaggacctggggctggagctggcggagctggtgccgcgcctgttcaggatggcctccaaagaccgcgaggaccttctggaggtaaatctgcagaatggcattttgtttgtgaattctcggatcgaccgcgaggagctgtgcgggcggagcgcggagtgcagcatccacctggaggtgatcgtggacaggccgctgcaggttttccatgtggacgtggaggtgagggacattaacgacaacccgcccttgttcccggtagaggaacaaagagtgctgatttacgaatctaggctgccagattctgtgtttccactggagggcgcgtccgatgcagatgttggctcaaattccatcttaacctataaactcagttctagcgaatacttcgggctagatgtgaaaataaacagtgatgacaataaacaaattgggctcttattaaagaaatccttggacagagaggaagctcctgcacacaacttattcctgacagccacagatgggggcaaacctgagctcacaggcactgttcagctgctggtcacagtgctggatgtgaatgataatgctcccactttcgaacagtctgaatacgaagtaagaatattcgaaaatgcagacaacggaacaacagttatcagactgaatgcttctgatcgggatgaaggagcgaatggggcaatttcatattcttttaatagccttgttgcagccatggttattgaccactttagcatagatcgaaatacgggagaaatagtgattcggggtaatttggattttgaacaagaaaacttatacaaaatcctcattgacgccacggacaaaggccatcctcccatggcgggtcattgcaccgttttagtgagaattttggataaaaatgataacgtccctgagatagcactgacttccttatccttgcctgtacgtgaagacgctcaatttggtactgtcatcgccctaattagcgtgaacgacctcgattcaggtgccaacgggcaggtgaactgctcgctgacgcctcacgtccctttcaagctggtgtccaccttcaagaattactactcgttggtgctggacagtgccctggaccgcgagagcgtgtcggcctatgagttggtggtaaccgcgcgggacgggggctcgccttcgctgtgggccaccgccagcttgtctgtggaggtggccgacatgaatgacaatgctccggcgttcgcgcagcccgagtacacagtgttcgtgaaggagaacaacccgccgggctgccacatcttcacggtgtctgcgcgagacgcggacgcgcaggagaacgcgctggtgtcctactcgctggtggagcggcgggtgggcgagcgcgcgttgtcgagctacatttcggtgcacgcggagagcggcaaggtgtacgcgctgcagccgctggaccacgaggagctagagctgctgcagtttcaggtgagcgcgcgcgacgcgggcgtgccgcctctgggcagcaacgtgacgctgcaggtgttcgtgctggacgagaacgacaacgcgccggcgctgctggcgcctcgggtgggtggtactggtggtgcagtgagcgagctggtgccgcggtcactgggtgcaggccaagtggtggcgaaggtgcgcgcagttgacgccgactcaggctacaacgcgtggctttcgtatgagctgcagcccccggcaagcagcgctcgcttcccgtttcgcgtggggctgtacacgggcgagatcagcaccactcgtgtcctggacgaagcggactctccgcgccaccggctgctggtgctggtgaaagaccacggtgagccggcgctgacagcgacggccacggttctggtgtcgctggtggagagtggccaggctccaaaggcgtcatcacgggcgtcggtgggcgccgcgggcccagaggcggcgctggtggatgtcaacgtgtacctgatcatcgccatctgcgcggtatccagcctgctggtcctcacgctactgctgtacacagcgctgcggtgctcggcgccacccaccgagggcgcgtgcacggcggacaagcccacgctggtgtgctccagcgcagtggggagctggtcgtactcgcagcagaggcggcagagggtgtgctccggggagggcccacccaagatggatctcatggcctttagccccagcctttcaccttgtcctattatgatgggtaaggcggagaatcaggatttaaatgaagatcatgatgccaaagtaagtgaattttcataattaacagttaatttttattttaaatttataattgttttcctcatatttgtcttctatatttctgtttttaatttttaattaattttacaaaattacatattttcattttattgtgtttcttattttaatctctttgcttctttaatattcataatttaagtgaaattagaaatcactgtccacaatctgcacctcagaatttttgtcttcaaaccaaaatattcttggatatgtcgttttctgttgcattttaattcagaatcatagtagcatttttttctgattaattatatgggattttcatttgtttgcctttgagctttaggataatttttttacatatactcttttttgatcatatattgaaatttgagcaccagtgtatcacttatgtttttacactttccatttcaatgtttttctgtcgacacttttattaagctaacgctttgattttatccattttgtgtaagaactctgatcatcatagtttttatctgtggttcccttttcagacttgtgattccgggaggcaatagtgttcatttattgtcccccttttaaaccattgaggaataaaggacaaaaacaatagttatcagcctgaatacttctggttgttatggttattgatttatttactaccgatctaaataatggaaaaatagtgattcaacagaatttagaccttgtgatcaagtaaatttatatgaaaactgcattcctctggcattgcggctctcttatttctgtttgaatttcacttgatggtcttctcttcatggagtctaaatctatttctttgtattagtgttttcattgtttctacacagtaatttaaactattcactattttgtatgtgtgtgtgtgtgtgtgacagggtcttgctctgtcacccatgctggagtacagtggtgcaataatggctcactgcaccctcgaatgcctgggctcaagtgattctctcacctcagcctctggagttactacacacgagcaccaccatgccccccaccttttttttttttttttttttttttaagagatggggtttctccatgttgcccaggctggtctcaaactactgggtgcaagtgatctgcccaccttggcctcccaaagtactaagattataggtgtgagccactatgcttggctagtcattatttctttgaatgaaaagcagcaaaaagtagtgattaagtgtgagttttggtgttatcctcccttgcctaaatttcatcgctaccaattttgttttgtggatggattgtttcacctctatttcagtttcttctgtaaagttggaatgataaacactagtttcaatgatagaattgtcataaagctttagtaagttgatattgtaaggcgcttataactgtgtttgccaaatagcaagtgcttaaaaaatttgctactagttttccgaagaggaaaagaaaaactttatgtcattttatgctaggaaactctcattacggattccatattgttttcattttacgtaaagattgaatttttgttattcatagtgaggccataattaccaatttaatctgagatgtctctaacattttaaatgccatgttctacattaaaagcaatttaaaatgtgtgtttcaaagttgaaaattgaattaagacttggacagtggaaaagttttatgaattcaaaagacatttaacctgctgagtcctcagtgatttcctggagttggttttgactttttgtgttgtccatgttcccaggaaatattagactacattaagcatgaatggtgtatttgcccacatttaaaagttgcttaagggccattagaggactgagttgtggtttgtgtttcctaatgtgagcattttccattcttgaaatggcagaaactggtagtggtattttctgttttctaaaagaagtacatgataatttttaagcgtgtaattaatattgcactaaaatttaaaaaaactaactctacatacttaagagtggcagaattgtctctgattatactgaagatcaccatttgtgtagctaatgatatctaacagcctcaaaacagcatactttcttaggaagtagagaactatagcgttgctagtgagtaaatgttttttaaaaagttcctaggagggtctttaagagtatcacactgtgcctgctgagaatcatcgaattaacaagacctggcttcaaatttaatagataaataaaggtaagtatcctacataaatacgatgatagtaaaagcaagaatattgtaagaggtgctagaaaggtacatcatagtgttattggaattggaaaaaaatctttgcctttttcccttgttgaaggagaccgtgaagagtcatgatgttttactggttataaaatggaaagagttttccctgggagaatatggagactaacaggtattcatgagaagagagtaacttaagtgagtatacagaaaattccaaatgtacctagaaatgaggaatagtccactttgggtaaagcacatggttcccataagagagagtgtgatataaagcaagaaaagtaatatgagaaaaaccttttgtataactttgagtactagacgagtaattttgacactcttcaaagtcatttgaaagctgtcaaaaagtgtgaagcaatacgaataaaaagtattaacggaagatgactgcaaggattaaatgaaggagaatgaaataggaatggacaggttacacaataagaagctactgcaatacaccaggagagcagcaattataaaaacttatttaggaaagcatctgaatacagacataattattttacatgccattgggaacattggagtgaaacattccagaaaacgaacacagtaaggtagatccaaaaaggatgaaatacctcaagacttgatcaaagggctgctgtatgtgagatggctgagcactgaaatttatctaataaaataaacttacattttaaaagaaataatacaaatcatatttgagattgtaaaaataggcatatattcataacacacaagtgttcgaaaggatagaatgaggaaacaaatataaaatgatgaactcctgaaacagtatatatagattctgctaaagcaaaaaattcagaatacttcctcctcaaaaagttcacatgatacaaattcttccccttcaaagattccccaaaccttctcttattttgttttcccaagagaagtgtctggatagttgctaatgtttcttgcctcctaaaaagaaaacacacacacacacaccgctttctaagtttctctttcatcaatcagtagattcttgagatcctgggtccctaaaagagtacaggatttttcttaacaagcgatactgaatcaagaatatgaagtttcctgggatctagatcaaaggaatttaaacttgcagttgtttaaattcatgttgtcacttaggtttctatctttatttaaaactgtgtgaaaaaaaagtttttctaaggcatgaggaagctacagttctggtaacactgagtattcaaaagccatcagtcgcctaagaatgcttctaacaatcatgagaaatgctattttaacctttaacaacaatgaagaaaaaaattcagagtttgaaataaaacttttcatctgattaatagtttgtaatggtttgtaattcttacttacatgatggccacatgatgtcgctctttaccgcaaattctttcgtaatcagcaaaaggaagtcattccttttcgcactggaaagacgctccactctctttcactctttggatgcacaacaatggccacacatcgagattgaaatgaagggataaaaacattcctataaattcgaaggcaagttttgctgactagaaaaacaagccaataatttgaaatggtgtgcccgaatggatacgacccagggggccgacatctactgctgtttattataattctagcagcttgggaggcagggagaggccagctccactactcggtccccgaggaggctaaacatggcaacttcgtgggccgcatcgcgcaggacctggggctggagctggcggagctggtgccgcgcctgttccgggcggtgtgcaaattccgtggggatcttctggaggtaaatctgcagaatggcattttgtttgtgaattctcggatcgaccgcgaggagctgtgcgggcggagcgcggagtgcagcatccacctggaggtgatcgtggaaaggccgctgcaggttttccatgtggacgtggaggtgaaggacattaacgacaaccctccggtgttcccagcgacacaaaggaatctgttcatcgcggaatccaggccgcttgactctcggtttccactagagggcgcgtccgatgcagatatcggggagaacgccctgctcacttacagactgagccccaatgagtatttcttcctggacgtgccaaccagcaaccagcaggtaaaacctcttggacttgtattacggaaacttttagacagagaagaaactccggagcttcatttattgctcacggccaccgatggaggcaaacccgagctgactggcaccgttcaattactcatcacggtactggacaacaatgacaatgccccagtgttcgacagaaccctgtatacggtgaaattaccagaaaacgtttctatcggaacgctggtgattcaccccaatgcctcagatttagacgaaggcttgaatggggatattatttactccttctccagtgatgtttctccagatataaaatccaagttccacatggaccccttaagtggggcaatcacagtgataggacatatggattttgaagaaagtagagcacacaagatcccagtcgaggctgtcgataaaggcttcccacccctggctggtcattgtacagttcttgtggaagttgtggatgtaaatgacaatgctccacagttgactctcacttccctgtctctccctattccagaggacgcccaaccaggtaccgtcatcacattgattagcgtgtttgaccgagattttggagtcaacggacaggttacctgctccctgacgccccgcgttcccttcaagttggtgtccaccttcaagaattactattcattggtgctggacagcgctctggaccgcgagagtgtgtccgcctatgagctggtggttaccgcgcgggacgggggctcgccttctctgtgggccactgctagcgtgtccgtggaggtggccgacgtgaacgacaacgccccggcgttcgcgcagcccgagtatacggtgttcgtgaaggagaacaacccgccgggctgccacatcttcactgtgtcggcgggggacgcggacgcgcagaagaacgcgctggtgtcctactcgctggtggagctgcgggtgggcgagcgcgcgctgtcgagctacgtgtcagtgcacgcggagagcggcaaggtgtacgcgctgcagccgttggaccacgaggagctggagctgttgcagttccaggtgagcgcgcgcgatgcgggcgtgccgcctctgggcagcaacgtgacgctgcaggtgttcgtgctggacgagaacgacaacgcgccggcactgctggcgcctcgggtgggtggcactggtggcgcagtgagagagcttgtgccgcggtctgtgggcgcgggccatgtggtggcgaaggtacgtgcagttgacgctgactcaggctacaacgcgtggctttcgtatgagttgcaaccggtggcggccggtgcgagcatcccgttccgcgtggggctgtacactggtgagatcagcacgacacgagccctagatgagacggacgcaccgcgccaccgccttctggtgcttgtgaaggaccacggggagccctcgctgacagccacagccaccgtgctggtgtcgctggtggaaagcggccaggcaccaaaggcgtcgtcgcgggcatcgttgggcattgcaggcccagagaccgagctggtggatgtcaacgtgtacctgatcatcgccatctgcgcggtgtccagtctgttggtgcttaccctgctgctgtacacggcgttgcggtgctcagcgccgtcctctgagggcgcatgtagtttggtaaagcccactctggtgtgctccagcgcggtggggagctggtcattctcccagcagaggcggcagagggtgtgctctggggagggcccacccaagacagacctcatggccttcagtcccagccttcctcagggtccatcctctacagacaatgtgagtcataaataatcttgtttccaacaattttaaaacaattagttcaattggtctccttaaattttctttcataatttcttttttagttgatagctttatgtataattattattttttaatgttatgctgtatttgcactaattatttggaagtacgtttaatatacacttttgttttgggatgcgtaatactatagatcaaaatctatggtttatgttggctactctccatttttggaggaggactttgctaactggagcaatggattcacctttcttctatagtgtatttacaaaatcaaatatttacatttccatattttgataatcaatacctataaatgttatagtaaacaaatttaatatatatgttacctaatattttattctatgtattgtcctcattttataaaatatagctgtgtcaaaatcatctgttcaattttgcctttttatctttagtctagaacttgaattttaagcatttcttttacatctatttatcttctttttatcatatttgtgtagcactgacttctttttaacttactttgttgagatgtatttgccatgttcatgaagaattaatatgaacaatttaaaatagtttaaatggcagtttaatagtattttttattttgttccttgtttgtataagaaatatattcacattcaaaatttcaaagagtgaaatctagtacgtagtaaaaaatctccttgcctcctcaaaccccaaaccatttactttacctttctgaatttctgaagcagtttactttttttgtatattcccaagattattattgccaaattatataaatatatttacaatcaccaaattgtaaatcgccaatatatatattttataatttgccccttccttccttccttcctttctttctttctttcttcctttttctttcattctttttcttttttctttcttctttcaagacacgctctcactccatcacccaggctgctgaaatgcagtggtgggattatagcccactgcaacctgaaagtcctgggctcacaggatcctcccatctcagcctctggagtagctgggaatacagtttgcatgtcattgtgcctggctaattttattttatttttgtagagacagggtggagtcttgtttcccaggctggtcttgaactcctggcttcaagcgatcctcctaccttggcctcccaaagtattgggattacagacacgaacaaccacacccagcctgcctttcatctttccttttttttaaaaaaagaagtgattacagtagaaacctacctttctgcactttttggttttccactttaagttatatatatatagtgtgtgtgtgtgtgtgtgtgtgtgtgtgtgtgtgtgtgtgtgtgtgtgtgtgtttgacagagttttactctgtcgccctctctggagtgcagtggtgcaatctcagctcactgcaaaatccgcctctctggtacaagcagttctcatgcctcagtctcccaagtagctgggattaaagacgccaacaaccaagccatgctaatttttttttttttttgtatttttagtagaaacagagtttcaccatgttgccccggctggtctcgaaatctgggactcaagtgatctgactgcctcagcctcccaatgtgctgggattacaggagtgagccaccgcatccggcctaaattatatattgggttttgtggcatattatttcattagcgcttattccttgtttttgattatttgctttcttatttttaaaagtatttgcatcttattttcttttatggatatatcatgatttattcatccagtactgtattagggacattaatgaaacaataaccgaattgtctagacttttaaaaattttttacaaataatttggttggtcaaaaaaatgatagttaacggggcatggtggcacacacctttaaccccaacatttcgggaggccgaggcaggaggattgcttcagtctagtagtttgagaccagcttgtgcatcttttgtagagactttgtaaaattagctatgcatggtgatgcatgtctgtagtttcagctactcaagaaactgaggtgggaggatcacttaagccagggaggtccaagctgcagttatcatgccactgaactccagcctaggtgacagagcaataccttgcctcaaaaataaaataaaatgaaataataaaataaaataaaataaaaacccagaactgacaattttcactgttcctaatattctaatatactttagtaaattattttaggatatgttactgttttcttttcaacgtgaataaggatagaggtatgcaaagtcaaaaacctgtctgataatcaatagaattatttaccattaagccataatatgtcattcacataagcagaccaagtttgctgctcttgttgaaagatattcagttttgtggaaaaatctataaatatctttgaccttcaaagatgtaactgtaatctgtttttattgctttgcttttatgcttacatgcatgtatatttaaaaccttcctagcatattattaaagttttaaatatcctatttatattgggaaatacctgaagttgataggggatcctccttagccacctaagctgtattcatcaattattatgatgatgatgatgattattatttttgagacagggtctcactctgtagcccagactgcagtgcagtggcacaatctgggcttactgcaatctctgcctcctgggctcaagtgatcttcctacctcagcctctcaagttgctgggactataggcacacaccaccatgcccaactaatttttgtattttttgtagagatggggtcttaccatgttgcccaggctggtctcaaactcctgagatatcgagaaatactattttctttacaaattgtttgctactatttagagtcaactacagagatttttttgggtaaataatgtgatgacaaatttaaatcatttcacagaaaatacccttatttgcctttcctatttaacctacgtttttggtaagaattttgtagaaatttggaggagctcttaattgcctactatgaaggcattcatgatgaatccatggagaatttacttttgaggtggactttgaaagatgaatagaattttgacagaaaaagatgaagtaatagaagaaaaaccttgaacaaagagtgtgccaagaaggagacaacatattttctgtaaaatatgactcctattggaaagtggttagccttagcactgagaagattggctcatggtcacgtagcgtatctcccagatggaagtctaatgtcttgacaattagtcaatagaaagataaacttgttgaagattttagtgaaatcgagtgaaagctgtactaataaggacagaaattatcacacgtgaaaggagagatgggatgtatacaaattttaaatatggtaggcaaaggaaaagaagtcataaaaatacatatgagtaaatgtggagaatcactatgctataaaaattgtgattttttaatgatttgggttttgggtgattattgattagatattcttttaactttggtcgactcattttctaggcaatgttagggtatacaggtaaaaatgtcaggtagaaaatgaaaatagggggttgcagatatggagttaagaatacttcaaataataggctagtttaaagccgtggaaatagaaacgttaaataaaaagttggggaaaaaagtttaaaggcataattctggtaaatactcactttttggagcagaagaaagatgaagaactaacaagccaatgatggcaatactgctagagtttggcatgtcagagaaatcataaaggaaaatgttttaagtgagaggctgaatttaacaagctatagagatatagagaaatagtgtaaagaatatgcacatacatttttattactttagtaaataaaacggttcaggcaatttgacatttattgaataaagaaaagcaaaaatttaacaataagaacacaagaagataaaatgtagaaaagttagaattatatgctcacctcagagtaatatataccagtgtttctggtgaccaaataaatattaatgcatttcttccacacgaaactatggaggacagtttacatttctgatatccatgacatacaggtcatacttaaatttattattaattgatacgatatttgaaatattgggaagaaattcctttccttatgaagaagaaatccctagctgaaactaatgtaaggagccagacagtatgaatgcctctgcaattgataaagttaaggatttactattaaattatgataaagaaatagaaagtgcatagaagaacccagatattgcggaagtaattcatgtaatcattaccttttgaagccacatgatgtcgctgtctaccaagaagttctggttggtcaatgttcaaagtcttttctctgacagcatctgtctctaaaggccgaacaacgggagatgcagcggaattggattaaaagactctgaaagtacagtcgttcatctttatattaagataatattttctgataggaaacgactatttaacatggattatcactggcgaggagagctgggatcctggcgactactactcttgcttctgctcctcgcagcctggaaggtggggagcggccagctccactactccgtccccgaggaggccaaacacggcaccttcgtgggccggatcgcgcaggacctggggctggagctggcggagctggtgccgcgcctgttccgggtggcgtccaaaagacaccgggaccttctggaggtaagtctgcagaatggcattttgtttgtgaattctcggatcgaccgcgaggagctgtgcgggcggagcgcggagtgcagcatccacctggaggtgatcgtggacaggccgctgcaggttttccatgtggacgtggaggtgaaggatgttaatgacaacccgccagtgttccgggtaaaagaccaaaagctgtttgtttcagaatccagaatgccagactctcggtttccgctagagggcgcgtccgatgcagatgttggagctaactccgtgttaacctacaggcttagctctcatgattacttcatgctagatgtgaattcaaagaacgatgagaataaactggttgagctcgtattaagaaaatccttggacagagaggacgctcctgcgcaccacttattcctgacagccacagatgggggcaaacctgagctcacaggcactgttcagctgctggtcacagtgctggatgtgaatgataatgctcccactttcgaacagtctgaatacgaagtaagaatattcgaaaacgcagacaacggaacaacagttatcaaactgaatgcttctgatccggatgaaggagccaatggggcaatttcatattcttttaatagccttgttgaaactatggttattgaccactttagcatagatcgaaatacgggagaaatagtgattcggggtaatttggattttgaacaagaaaacttatacaaaatcctcattgacgccacggacaaaggccatcctcccatggcgggtcattgcaccgttttagtgagaattttggataaaaatgataacgtccctgagatagcactgacttccttatccttgcctgtacgtgaagacgctcaatttggtactgtcatcgccctaattagcgtgaacgacctcgattcaggtgccaacgggcaggtgacctgctccctgatgccccatgtccccttcaagctggtgtccaccttcaagaattactactcgttggtgctggacagcgccctggaccgcgagagagtgtcggcctatgagttggtggtaaccgcgcgggacgggggctcgccttcgctgtgggccaccgccagcttgtctgtggaggtggccgacgtgaacgacaatgctccggcgttcgcgcagcccgagtacacggtgttcgtgaaggagaacaacccgccgggctgccacatcttcacggtgtctgcgcgagacgcggacgcgcaggagaacgcgctggtgtcctactcgcttgtggagcggcgggtgggcgagcgctcgctgtcgagctacatttcggtgcacacggagagcggcaaggtgtacgcgctgcagccgctggaccacgaggagctagagctgctgcagttccaggtgagcgcgcgcgacgcgggcgtgccgcctctgggcagcaacgtgacgctgcaggtgttcgtgctggacgagaatgacaacgcgccggcactgctggagcctcgggtgggtggcactggtggcgcagcgagcaagctggtgccgcggtctgtgggcgcgggccacgtggtagcgaaggtgcgcgcagtggacgccgactcgggctacaacgcgtggctttcgtatgagctgcagccagctgcaagcagccctcgcatcccgttccgcgtggggctgtacacgggcgagatcagcaccactcgtgtcctggacgaagcggactctccgcgccaccgtctgctggtcctggtgaaggatcatggtgaacctgcgctgaccgccacggccacggttctggtgtcgctggtggagagcggccaggctccaaaagcgtcatcgaggcagtcggctggcgttttgggtccggaagcggcgctggtggatgtcaacgtgtacctgatcatcgccatctgcgcggtatccagcctgctggtgctcacgctgctgctgtacactgcgctgcggtgctcagcactgcccactgagggcgggtgccgggcgggcaagcccactctggtgtgctccagtgcggtggggagctggtcatactcgcaacaacagccgcagagggtgtgctctggtgaggggccaccgaagacggacctcatggccttcagcccctgccttcctcctgatctgggatcagttgatgtaggcgaagagcaagatttaaatgttgatcatggcctcaaagtaagtccatttaaatttagaactcataaattctatttgtggaaattgtagttactttaaaagtgtttcagatttagtttttcaccgtattttatagtgaaaatttaaacattgtttagtttttagaaaccttttataattaattgaattttctcagtggcataatacagtattaatcattctccacaagttgggtctatcttgaaactcaagttatggttggatgatatccattttttactgaatatttattttggcctgccttacagccgtcttctctgaacaatactctaaggacgttcagggcattttgatctttggtgaaagtattcccccaaagcgtttattcttttgtccttaggcactgaactcttaatcttactccatatgctgtactttgaaatgcatgttttaaatatgttgtctttatatttacttttattcactttaagatctcggtttattcatcttatctgactttttagtgtctggtagtcacaaatatctttggtgtttcactattgccgttttaagcagtgtagtgataaaatacagaatgatagtgtttttcaaaatttgatagttttcatattcttcctaattttattataaactagttaaaaagtaaaatcaagagggaagagatttgtaatccttcttttaattcattatttagaccattttaccatttggagacatgttttttattctacatgatttttacagttgtattgtcgccaacttaacattttttgagcctctatgtttaggaaatgattactttattcttgcaagtatcttctaaactctaatcattcaaccctttgttcatgagttggaatattttcaataatattccacattaaagtgatatttaatatatgacttagaaaaatgttttcatcagaaaaactatacatgataatttcattcttgcaaaccaaacatataatttataaatccttattatacagaatatttgggattatcatggcccattagttcgtgtaaaaatatttagtattatgggataaatctttgaaaaatccaagatactttattttggtatctttcaacattttctttcttttatttcttcttgtctttttacacgtttgcttcttgtgactgttggacctgcctggatattaaatacccattagacttcgtgcatattgctttggagagaatggtagaaattgatggaagggaatgaacgatttctgggactctgaattcttacagtttgttattagtattgttttaaatcttttaatcacttatgaacaaataatgtaatcatttatgggcatattttagcccccttgtccaactgaaggtaacctcaaagcagcattgttttgtagtttattttacagttctcttaatgcctgtccatgtttagcattttatttgactatttgaacacattgtgtaaaagcgaattgttttcattttagtcctttaaaaaatatgattgttttcatttaagtccttttaaaaaatatgattatctttattatcctgtttgaataatatgtgttttcctttgtgaaagtaatatttcctatcctgtctatgtctacctggttctcaggtattactttaattactgaattctcctaaacatttaattgacttttacaaaatatcataaataggaggattctttccaccacctagcattgtatttggcaatttatcatttaagtcattttagttctgtttttcttcaactctctgatatttgaatttggggttgtgctttcacagtgagaaagtctaaacctatttcttgtacattaatacttttcactattctaattatggtgatgcttttagctattaagaatttctgggattgaaatgtgtcagaagttagttattaagtattgtggattctgaagctctctaaatcaagtcctccctttaccaatttttgtatgtgtagccattggtaaaggatttgttattcagttccttggcattatatgtatgcatgataaatgtgaattctactttatagatttatttgtatcaagtaagttaatagttataaattattaataataaactctggcaagtgataggtacataataaaatttagttattaccattcttaagagaaaagaagttagtgattgcagaaaggcaacctaaaatgtcagaaagtcgttatggccttccatattaatcttatttttgtgtaaaactatcttctgtaaagtcattttttagattaacctaggatgtttcaatattttgaatgttgtgtggtggaatgaaaaaaatctaaaagttattacgagtttaggaaagtcaagttaacaccacctatgtgggaaaacagttttttggaaaggttaaagtccttccaaggaatgtgtagactatcttactttgatagttgtatgtttcccatatttaaaagttgcctgagatcctgcagaggcctgagtaggcgtttgagttctttgtatgtatgagatctttccattaatagtatttttcttaaaaagaagtatacaataatgttttgatgatgatttaaagtcaatttatgttgtagttctatgaattaagtaaaccatttatgtagagtgttgtaaatagccttttaaagtgctttctcttttttcttttcttttctttctttctttttttttttttttttttgagacggagtctcgctctatctcccaggctggaatgcagtggcgcaatctcggctcactgcaacctctgcctcccgggttcaaatgattctccttcctcagcctcccaagtagctgggattacaggtgcatgccaccatgccctgctaattttttgtatttttagtagagtcggggtttcaccatgttagccaggatggtctcgatctcctgacctcctgatccgcccacttcggcctcctaaagtgctgggattacaggcatgagccaccgcgcccagcctaaaatgctttcttagcaagtagagaagattgtaataaccagtcttcattaaacattaaataggacccttacagatctctaacagcatatcatcatgtcaggaattattactgagccccagcccctggctttaaaatttgaggtcaaataaagaatatgagtcacacaatgcaaggcaagataatgtaacaggtacaagaggtaaatcagaatgacgttgaagttgaaagacaatcatttcctatttgaatttttgaagaaatacttgaaggggcatggtgtgtttcagtggttttaaaataagtaagttccccccgggagaatattgagaatgatagacatttcttggaaagagaaaacataaggaaagttgaagacacagaaagcatcaatatgacaagtagaaaagtccactttggttaaaacacacagtctgcagagaatgaaagcaggaaaaccaatgtaagaagatctcttgatttctgagtaataaactaaagggccatgagtgattaaggaatttggccactctttagaattaattgggagctatttaactaccttgagcaaaataaatcacgacttttgaaagaaggttgaacgggaagacaaactcagaagctcctgcagtaatcaaggacagaagcaattgttaaatgcacctcttaggctgttatcagtagaaatacgaaataaaagataaatatgcaaaaacattaatggcacaataaacactcacggttttgcctttagacttgagatacactaaaatctagatttaattaatcgacttggacgttggaataagatagtaaaactcacaacaaaactttgtagaacttagtcaggaaaagaatctcaagcatagctttaaaaacagaaattgccccgagtactaaggatgagcaataatgaaattaaaacatattgtaataacattacacaaactatattggagactacaaagaagagattattcatagattataaagcttggaaagaatcaaaacaacacatttctggaaacagattgtataaatgctacaaaagagaaaaatatattttctccccacgcaacacaagaccttaaagtcaattctcgcttttcttgcaatattttataccttttcaattcatagaattactcaagaaaactacctcagttggttgctactttttgttgattccttttaccagacatgactaagtttctttttcatcagtagatttctgggctcctatattcactagagattgcaactcctggatttctcttacactagaatcctatttcgagccatatgggagattctgaattccagaacaaaagaattttgtaatttaaaattcgtgattgctcaatggaatcattttaattgttacttcatttctgtcgttatttaaaacttaagtggagagttttctcagggataagaaaaccacaatcaaggtcatacaaaacttttagaggcagtcagtctgctaagaaggctccagcaagagaaacgggatcttctgtttcaacaatcattacttaagaaaaaattaagaaaatgaaataagttttgcagaataactgtgaaatttttattcatgaaatatgtacttacactttgggccacgtgatgtcactctttgccgcgatgttctctctgaatccagacaaatacagcccttttcccatgggaaagaggctcaattctttttcactctctctgtgctgaacgatggcgaacacagcagaatgggactgacgaaatcagatgatttcttctaatttggaggcaattttcactaattagaagaagactgagtatttgaaatgttatactcaagtcgaggagatccagagggtcagcctctactgctctcgcttctgatcctcgcaatgtgggtggtggggagcggccagctccactactccgtcccggaggaagccgaacacggcaccttcgtgggccgcatcgcgcaggacctggggctggagctggcggagctggtgccgcgcctgttccagttggattccaaaggccgcggggaccttctggaggtaaatctgcagaatggcattttgtttgtgaattctcggatcgaccgcgaggagctgtgcgggcggagcgcggagtgcagcatccacctggaggtgatcgtagacaggccgctgcaggttttccatgtggacgtggaggtgaaggacattaacgacaaccctccagtgttcccagcgacacaaaagaatctgttcatcgcggaatccaggccgcttgactctcggtttccactagagggcgcgtccgatgcagatatcggggagaacgccctgctcacttacagactgagccccaatgagtatttcttcctggacgtgccaaccagcaaccagcaggtaaaacctcttggacttgtattacggaaacttttagacagagaagaaactccggagcttcatttattgctcacggccaccgatggaggcaaacccgagctgactggcaccgttcaattactcatcacggtactggacaacaatgacaatgccccagtgttcgacagaaccctgtatacggtgaaattaccagaaaacgtttctatcggaacgctggtgattcaccccaatgcctcagatttagacgaaggcttgaatggggatattatttactccttctccagtgatgtttctccagatataaaatccaagttccacatggaccccttaagtggggcaatcacagtgataggacatatggattttgaagaaagtagagcacacaagatcccagtcgaggctgtcgataaaggcttcccacccctggctggtcattgtacacttcttgtggaagttgtggatgtaaatgacaatgctccacagttgactatcaaaacgctctcggttcctgtaaaagaggacgcacaactggggacagttattgccctgattagtgtgatcgacctagacgcagatgccaacgggcaggttacctgctccctgacgccccacgtccccttcaagctggtgtccacctacaagaattactactcgttggtgctggacagagctctggaccgcgagagtgtgtccgcctacgagctggtggttaccgcgcgggacgggggctcgccttcactgtgggccacggccagggtgtctgtggaggtggccgacgtgaacgacaacgcaccagcgttcgcgcagtccgagtacacggtgttcgtgaaggagaacaacccgccgggctgccacatcttcacggtgtctgcgcgggacgctgacgcgcaggagaacgccctggtgtcctactcgctggtggagcggcggttgggcgagcgctcgctgtcgagctacgtgtcagtgcacgcggagagcggcaaggtgtacgcgctgcagccgttggaccacgaggagctggagctgctacagttccaggtgagcgcgcgcgacgcgggcgtgccgcctctgggcagcaacgtgacgctgcaggtgttcgtgctggacgagaacgacaatgcgccggcgctgctgacacctcggatgaggggcactgacggcgcagtgagcgagatggtgctgcggtcggtgggcgccggcgtagtggtggggaaggtgcgcgcagtggacgccgactcgggctacaacgcgtggctttcatacgagctgcagccagaaacggccagcgcgagcatcccgttccgcgtggggctgtacacgggcgagatcagcacaacgcgtgccctggacgaaacggacgcaccgcgccagcgcctactggtgctggtgaaagaccacggggagccagcgctgacggccacggccactgtgctggtgtcgctggtggagagcggccaggcgccaaagtcatcgtcgcgggcgtcagtgggtgccacgggccccgaggtgacgctggtggatgtcaacgtgtacctgatcatcgccatctgcgcggtgtctagcctgttggttctcacgctgctgctgtacactgtgctgcggtgctcggcgatgcccaccgagggcgagtgcgcgcctggcaagccgacgctggtgtgttctagcgcggtggggagttggtcgtactcgcagcagaggaggcagagggtgtgctctggcgagggtaagcagaagaccgacctcatggccttcagcccgggcctttctccttgtgctggatctacagagcgaacgggagaaccctctgcttcctcagattcaactgggaaggtgggtttttctagcattttatttatttatataattttttttcttgaaagatattatcgattactcccaggggccgttcaaatagttttattcatttttctagaaatccagcagattttttttctgataaagtaaaccccttaacattggagccgactttgtcttgacttctagtgagaattataaactgtatattaaatagatattttttgggtgctgaatcaattttatttaaatttgtgattaaagtgacattgaatttctgatgctatgctgccataacacttgaaaaccaatttagttgttagtcattcattaaacattaacatcactatcatttatttattgctaaatgatgcatagtattttagtctacttgtattgtttataagaaacccaagcaaaaatatatagcaattgttaccttgttaagtttgtagttctctacatttctctggatggagactgtgaacatctgattgttcagcaaccttcagtatctattattttaataagaaagaaacttcccctaaactttagaaaacagttgctccactttaggaatcaaattatgtcaataaatgttataaacacagccttcatttcaacttatataaaatatgttttaaaatgcctgacaatgtagataattcaagaaatgttgactgaaattttgtctacacttagaacattttttgaaattcagtttacagaaattggagaaaatgctttttaaacaagtgtttcctttcttcaagaagatattctccttttaattgaaattttctccattcagtgataaaatgatcagccatgtgaagattcgaaacttcgagttcttttgaaattcagagtctgtaacttaaaacattacccttatgaatttagatgagaattcacttgttctgtcagtaatccataagacagaaatctgtttttttaaaaatatctttttctcctctcagctcatacataacacaaggcagaaatctggatatgagatttgcctctttaatgtcactacatgttatgtttcctgaattgtagtatgtgactttcaaaatggtggttttccacactctacctttagtgcaagctatttgtttgttttctaatttatagttttaaaaacttcgcttattgagtttttgttatgtggtttatatttttctttctctttcagctattttatttaatattgtgtcagatattttacaaggtatgacctaattaaaaactcagtagagaaagatcagaatggccttgagaatagagccacaaaaataactatgaaaatgccagtaacgtttatttaaaacaaaatattttaatttttaaattttcccttaaaacacacttttggaatatgctacaatattacatgttttttgtctttttatttttctgagacggagtcgttttctgccacccaggctggagtacagtggcatgatcttggctcactgcaacgtctgcctcctgggttcaagcaattctcctgcctcagcctcctgagtagctgggattataggcacatgccaccgcgcccagctaatttttgtatttttagtagagatggggtttcatcatgttggccaggttggtctcgaactcctgaccttgtgatgctcccacctcggcctcccaaagtgctgggattaaagctgtgagccactgtgccaaggcttttttattttttttttttgtcattttctttcaaaacttgagtggtctctgagctcctgtcattaaacctatctatatctgtctatcagcacaactcaccttgaatatagtcttatactttcaagtatctttgtctttgcacgtttttcaagtttcatgtgccatttaaacttggacccaggtatctgattatttgatgtgaatagagggatgctacagatgtcatttgtctcccgccctaagtcctccagtctccttagagctagtacttactaagcatttactatgtcatcaataatcataaaacgtatttttttttttgagtcagagtctcgctctgttgcccaggctggagtgcagtggtgccatcttggctcactccaagctccccctcccgtgttcacgccattctcctgcctcagcctcccgagtagctgggactacaggcgcctgccaccatgcccgcctaatttttttgtatttttagtagagatggggtttcaccgtgttagtcaggatggtctcgatctcctgacctcatgatcctcccgcctcagcctcccaaaatgctgggattacaggcgtgagccaccgcgcctggcctaaaatgtgttctttattattgacggctgtattgatgggattggtaatttagtccttcatattaatctctattctctctcagagtacaagctctcatcatatgcaaattctcagaagggctgtgaacaccttagtaataaatttatcttttgaggtcattagcaaacatgaactcacagggatccagagatggtaaaattcaaaacagcctgtcaagttcaaaacagagaggtgaaagcagaagagacactttcctattttgcctaataggtctccttatatgcatctgtagttaacattcctcaattcaagttagaatcatgaaacaataatgaagctcctcctatgtctcttttcaagttgtaattactatataggaaaaactaagttgtcacccaatatcttagacactttgagagcaaagggggtgctgtaaataagtatacaagatcacagacctaaattgagcctgttccagacaaattggggcctatggtcaacctatccttagacctgctaacgcattagcattagcagcacctaagtcctcattgaatgttctggttcaaggctccacctcagaaattctgaaatgggtagtaagagcaaattttcattttaaagcacacctgagatgattctcatacaaccgaaattttagatccatagccctatttgatacttgacagtgcaagtttctgtaatttaaaaagatgtggtggcctgacacctgcaatcccaacattttgggaggccaaggtgggagggtcccttccttgagcccagcagtttgagaccaatgtagtgagactcatctctgccaaaaaaaaaaaattagccgggcatggtggcacacatctctagtcccaattactcaggaggctgaggcgagagaatcgcttgagcctgggacattgaggctgcagtgaactgtgatggcacaactgcatttcagcccgggagacagcaagattctgtctcaaaaaaaaaaaaaaaaagagtagtttaactactccctactttttattcaatattggacatctacattgggatatttatgttatcacttggtataaaatgtacattagtagaaattgagtttagtttttattattttgtgcgtggagatgattgatcaatggcaaacttattttacgctccagatagctaaaacaaacgttgatattttgatacataactcattacattttaattcagggtttataaaaaagtaatctctaaaatcagaatttgaatgaattttgatgcaagaggcattccagaggagtagagaagtatagaaacagaatttagtaggacacataaactgatggattaagtgacacccatttctgtcagttttcttattcataaatattgttgctctgtcattcagattttaataaaaaaagtttaaagtaattgacacatttaaaaatattctttagaaaagtcaaaacatcattaaataaaataaattaacccttgcataagaccaatatgtctgttgttaagttttcctttcttggaaagacagaaaactcaagtttttttcagcagcacagatatattacattttcattcctgaatatttgatttcaagaactttgagagagaaaaaaatatttttactgcaagtggtgatgaaaaacttcactgacattgataaaattactagatatatttcagaactgtgtcttttgggcatttgaaaagcgtaaatataacagggttgaaagcatttgcctctgaaagcagaaataataaatttcttaattactttattcagaattataattaagattctttttgcccgtgtaagatattataaaatgaaacttcttgtataaaggatttttctgtaatagtacttttctgttttcttaaatacagaaaccaccactctcagcctgtgcagtagcaataattaaggcattctataggtaataattttgcctgatgagccaaatttggtattgagcctcatgaaaacaaatgtggccaaattgaggcctgagaatagtttccatttatgaagcactcattctccttaaggtactattgcaagcacttactatattataattcactcaaccaccgtattactattaggccaaagttataaaattggaacatgagggagggagaggttaaacgattttcccaagtcatgtggctagtgagtaggataataggaatctaaatggagaaatgtctgatgttgaagctaatgatctctaaattctagtgatgactagatcttcggagttataaacacctcacagatagttgatgcttgacattagtgtctaaataaaccttattaaatctcaaaataatgagaaagagaagtaagttaagtgtcagaacttaaatggaactaaagttgtcatttaataaaatattagtatactcagtagtatgcaaatattaagggcattttgaaattcggctattgataatcatgtggttagggaagaaatcactactctgagagtctacatttaagaaaacattgcacgtgggatcaacatttattgttattaactataaagagacgtaatgtgaggctttgaaagtccatagacataaaaatacgtaaaaaaagaattaacatatgaatgaaagaaaagttgtgaactcatggaatcgtacttacacctaaagccaccggatgtcgctgtcgtccacaaaatagctttttagaacaaaggcatcagccagtttctcaaggactaggaagtagcgtcattctgagatctcagccatttcgataaaaaatagatataagaaataggacagaaaatgtcagatcgtatgtgcgttctagaccgctgattcgtcgatttgtaaaacaagagaaggataagatggtttccagatgtagctgcctgggggtccagtgtctgctgctctcgcttcttctcctcgcagcctgggaggtggggagcggccagctccactactcagtctacgaggaggccagacacggcaccttcgtgggccgcatcgcgcaggacctggggctggagctggcggagctggtgcagcgcctgttccgggtggcgtccaaaagacacggggaccttctggaggtaaatctgcagaatggcattttgtttgtgaattctcggattgaccgcgaggagctgtgcgggcggagcgtggagtgcagcatccacctggaggtgatcgtggacaggccgctgcaggttttccatgtggacgtggaagtgaaggacattaacgacaacccgcccaggttctccgtaacagaacaaaagctctcaatacctgaatccagactgcttgactctcgatttccactagaaggcgcatctgatgcggatgttggagagaacgcattgcttacttacaaactcagtccaaatgagtattttgttcttgatattataaacaaaaaagacaaagacaaattcccagtgcttgttctgcggaagctgctggatcgtgaagaaaatcctcagctaaagttgttgttgacagcaactgatggaggcaaacctgaatttaccggatctgtttctctgctgatcctggtgttagatgccaatgataacgcccctatctttgacagaccggtttatgaagttaagatgtatgaaaatcaagtgaaccaaacattagtaatacggctcaacgcttctgattcggatgaaggaataaacaaggaaatgatgtattcatttagctctttggtcccacccacgataagaaggaaattttggataaacgaaaggacgggagaaataaaagtaaatgatgctattgactttgaggacagtaacacttatgaaattcatgtagatgttacagataagggaaacccacctatggttggtcactgcacggtcctagtggaactactggatgaaaatgataattcacctgaggtgattgtcacttctctgtctctcccagtgaaagaagatgctcaagtgggcaccgtcattgccctaatcagcgtttctgaccatgattcaggagccaacggacaggtcacctgctctctgacgcctcacgttccgttcaagctggtgtccacctacaagaattactactcattggtgctggacagcgctctggaccgcgagagggtgtcggcctatgagctggtggtgaccgcgcgggacgggggctcgcctccgctgtgggccacggccagcgtgtctgtggaggtggccgacgtgaacgacaacgcgcctgcgttcgcgcagtccgagtacacggtgttcgtgaaggagaacaacccgccaggctgccacatcttcacggtgtctgcgtgggacgcggacgcgcaggagaacgccctggtgtcctactctctggtggagcggcggttgggcgagcgctcgctgtcgagctacgtgtcggtgcacgcggagagcggcaaggtgtacgcgctgcagccgctggaccacgaggagctggagctgctacagttccaggtgagcgcgcgcgatgggggcgtgccgcctctgggcagcaacttgacgctgcaggtgttcgtgctggacgagaacgacaacgctcccgcgctgctggcgtctcccgctggcagcgcgggcggtgcagtcagtgagctggtgctgcggtcggtggttgcgggtcacgtggtggctaaggtgcgcgcagtggacgctgactctggatacaacgcgtggctgtcgtatgaattgcagtcggcggcggttggtgcacgcatcccgtttcgcgtggggctgtacacgggcgagatcagtacgacgcgcgctctggatgagactgactcgccacgccagcgcctactggtgctggtgaaggaccatggcgagccgtcgctgacggccacggccactgtgcttgtgtcgcttgtggagggcagccaggcacccaaggcctcgtcgcgggcttcagtgggcgtggcgcccgaggtggccctggtggatgtcaacgtgtacctgatcatcgccatctgcgcggtgtccagcttgctggtgctcacgctgctgctgtacactgcactgaggtgctcggcggcgcccaccgagggcgcatgtgggccggtgaagcccacgctggtgtgctctagcgcggtggggagctggtcttactcgcagcagaggcggcagagggtgtgttctggggagggcctgcccaaggcggacctcatggccttcagccccagccttccaccatgcccaatggtagatgtggacggggaagatcagtctattggaggggaccactctaggaaggtgggttattacgttttcattttccttttgtgctttatgaataatattttctcttaccgcattttctcaaatatgtatcagaatatttcatttttgtctacattccatttatgcttgaatatttctagtgatacctttgtaatataatttattccaggagttttaaaatttttttatcctacccagtgtgtcagcctttgattggtacttaaatttttttaaataacaatttattctgaatacactaatattttccaatacaaatatgtgatataggttgcagttctgacgatttactttcataatcacttttcgttacaaatatttgtgagattagtacttcatgttatttcatttccaatctaaattttgatttgattgtatttgcattaccaaaaaattccactgatctatatctcttcagtgaaaatgtgttttcctccatgtgtagaatatgtgtagcgtaccacagcttatactgccatagtagatttcaatgttcagtgattacagctttttctcaatagtgcagtaagtaggtgggcagttcattggtaaaaatttcttaatcttagcaattaagttaaatgctttgaactttaaaaacgttttccatttttattttagttgtagtggtacctgtgtcagtgtgtattattcacttagcagaagaaaatgtatgtttcttttatttacataattttatccagtagctcttcattatctgctcctttatcagcattaggcattgcttatgatattcaggtattagctctttcactttaaggaaggagtcatgcttatgtttaataatgaagagaatttgaacactttttacttttgagactgaaaatactttagtatgaattaatattaaaagtttgaggagaaaataaaattaatgttttctactgatctgatatattgtatagtttaatagcttctctagtcatcttaaacagggttgggttagatgatatagactcagaaatgaaagctaacttagttgcagagtgacaaaactacactatcaattgtgttttcctgaaattggttgttacctgatacccatgatttcatttttaaaaaaaatttattaattctagtgttaccaaacaccaatgccatgaatttgtcatcttgcctatggctcttagcaattacttttttctttcctttctctttgagtatggagattgaatttgttactcagtacgtgcttcacaaatagcttcaaataaaattaaaattattgttcaagtttaggaacaccaaaaaaaaattgtggcaagaatttaagcatggcattctttcagtgttaatactctccatgccctgtctccagctcttagaaattatagatgctaagttaatgcagagtttagaagtgtatttgttattttatcaaataggtttatgaaatatatacttccccctctgatattttgaaaaaaaatcttccttaatgtcttatattataagtaatataaaaaacttagtaaaaactcatatcaattgtaaaagtctcaggtatacaagtgcattaatctctccatcaatactaacttaaggccaggcatggtggctcacacctgtaatcccagcattttgagaggccaaggtgggaggatggtttgaggccaggagttcaagaccaacctgggcgacatagggatatcttgtactgtgtgtgtgtgtatatatatgtatatatgtgtatatatatatgtatatatatatgatgggctctccttacatatatatctatatatgtacttatgtatatataagccaggcatggtggtacatgcctttagtccctactgtagtgctacttgggagggtgaggtgggaggacggcttgagcctgggaagttgaggctgcagtgacccatgattgtgccactgcactccagcctggatgacaaagtgagaccctatttcaaaaattgaaaaaagcaaaagcaatagtaacaccattatcctgcaaatatgatctttttcatattaattcacgtgataatacagttggtgcagtagtactttatttaggatgtctacatacaagataaaactcttcatggaattctgatttgtaagacaaacccacctttgaagaggtactgatcatacacaagaaggtataggaaaggagttggaagctcacaaagagaaacataaacatatgcaggaatcaggaacgaagaagataagtgaaataatatgaaatcaaatgcacttatgttttgagcgacaggatattgttgttctccatgaaaagtttttttggtttttttgttttttattttttatttttttgagacggagtctcgctctgttgcccaggctggagtgcagtggcacgatctcggctcactgcaagctccgcctcccaggttcacgctattctcctgcctcagcctccggagtagctgggactacaggtgcccgccaacacgccaggctaattttttgtatttttagtagagacgaggtttcaccgtgttagccaggatggtctagatctcctgacctcgtgatccaccggcctcggcttcccaaagtgctggccgagtgccaccgcacccggccgaaaggtattttttttaacagaagaaaatcagattattcctagatcagaaagaagctccattgttcctgtactttaaaaactacaaacacccattaagaccacttggaacctcaggaacaaggaccaaaaggtctcagaggaactaagtctttctagtcatgaaatattgttttactaaccaaaagagaggcataattttagctgctagacaaagtggccaggaatcccggagcctacagcactggcttctgctccttgaattttgtgaagcgggaaaggaccagttccactacaccatcctggaagaggccaaggacggcacatagcgtcttcgcggtccctattgcgcaggacctgggtctggagcttgtggagctgataccgcgcctgtttcagttggattccaaaagccgcagaaaccttctggaggtaaatctgcagaatggcatttttgtgagttctctgatagacctcgaggagctgtgtgggaggatctcggagtgcagcatccacctggaagtgatcgtggacaagctgctacaggttttccatgtggaggtgaaagtgaagaacaataaagacaacctgccagtgttctcagcaacacaaaagaatctgtttctgaaacgagagctcttgattatcgtgtttcactagagggtgtctgtgatgccgacgtcggggccaatgctctgatgacttacatactgtgccgcaatgattatttttccctggaaataccaagagcaggtaaaaccacttgaaggtgtattttaaaaattctttcagataggtaagtcacttcagagctactcttggtgctcaaagcaactgatgggggcgaagctgagctgacaggcaccaaagcattatatatcacagcgctggatgtaaatgatgatgcccagtgtttgacaaaggagtctatcatgtgaaattactggaaaatgcaagagaaggtacactggttattagacttaaccccttggattttgacgagggttcaaaccgtcacattgtttctttgcaactgatgtctcccctaacatagaagccctttttcgcatagattcagacagtggataaataaatgtaaagataggttttgaggaaactaaataatgaaagattcaaatacaggcagttgacacaggcaattccccaatgtttgatcactgcacagacttgatagaagtcttggacatcaatgatagtgttccagagttagcagtaagtcactatcattccctgtacaggaggacgctccactgggtaccgtcatagccctaatcagtgtaattgaccctaacttcagtgccaagggacagacgacccgcaccctgactcctcacgtctcttcaagctggtgtctaccttcaaaaggcgctgcccagaaactattcgttggtactccacagcgccctggaccaagagagcaaatctatccattgttggtaatcgctcggaatggggactcgctttcattgttggccacagccatcgggtccgtggaagtggccgaacagtgaaccacaatgccctggcgttccagcagcccgagtacatggtgttcgtgaaaggtaacaacccgcggggctgccacgacttcacagtgtccgcgcgggaccgggacgcgcaggagaacgtgctggtgtcctactcgttgatggaacagcgggtgggcgagtgcgcgctgtctagctatgtgtgggtgcacgcggagagcggcaagaggtacgcgttgcagccactggactacgaggagctggagctgctgcagttctaggtgagagcgcgcgacgcgggcatgccgcctctgagcagcaatgtgacgctgccaggtattagtgctggaacgacaactttgtctgcgctgctggcgccttgggtgggctggcggcgctgtgagtgagctggtgcggtattcagtggatgcaggccacttggtggcgaaggtgcgcacggtggactccagctatgacgcctggttgtcgcaacagctgcatctgtcagctggcagcacccgttccacgtggggctctgcacgggcgagatcagcacgacgagtaccctggacgaggcgaaagctacgcgccaccgcctgctggtgctggtgaaggaccactgcgagctggcgctgactgccaccgtcaccgtggtggcgtcgctggcggagagcagccaagcgaggaaggtcccatcgcgggctttggcgggcgtcgaggtccgggaggcagcgctggtggatgtcaacgtgtacctgatcatcgccatctgcgtggtgtccagcctgttagtgctcacgttgctgctgtacacgacgctgcggtgcttggcgcagctcaccgagagctcgtgcatgccgggcaagcccacgctggtgtaccgcagcgtagtgggatctggtcttactcgcagcaaaggagattttactctggagagtcgcctcccaaggtcaacattacggcttttagtcctagtgttctcccatggttcagattttggagatggacttcaataggaaatttttgagaatataagtactgtaatcctggaaagtatttcattcctattaatgtccctcatagtgacattgataatgttcaccaagttattaatttgattgctttatttattttgcttttgctttttcttttgagatgctttatttaaagtacactggggccgggtgcggtagctcatgcctatttgtaatcccggcactttgggaagccgaggcgggcggatcactcgaggccaggagtttgagaccagcctggccaacatggtgaaactccatctctactaaagatataaaaaaattagctgggtgtggtggtgcgcacctgtaatcccagctactcaggaggctgaggcacaagaattgcttgaacctaggaggcagaggttgcggtgagcctagattaggccactgcactacagcctgggagacagggtgaaactctgtcttaaaaaaaaaagtacattggaagtctagccatcttaatcactttttactacagtcaccatgaacattctttaggaatattcttcagttgataagtataatgataatagtaataatgaattagactgagtggctgtttcctgtaaatgagaaagttaaatcttaccggaaggatcatgatgaataatgatccttatgagaaggtcaaatcttctcaattttgaagcaagttctttattcctattcattttcttattctgatttgtgtcctccattccttattgtttttatgtattcaaaaataccatgacaatatttaatatcataattatttgagtttaaaacatgtttaaatgtttatctttctataatcgataagtttatctctcacaaatggtgatgagcagggttgaggcagcttcgtccacaaacaattttgtttcttcatgatcaatatccatcttttttgagatgttgattgcagtgggtggaattttagccttgcctttaaaggtgattttacttcttaatttttgtcttcaatcttcttataatttcattttaggtcattgtcttcacaatcttcaactacttcagatagccaacaactttgttcttttttaaaaagaaaacaaaacaaaacaatgtcagctctacttaattacctgttgacttaattgctgctgtcctccagtttaagttgttgagctcttctactattttgggaagatttctttgagcaccgattatactcatttttctttcatttttggtacctggctgtatgaaaatattttagggtaggaaaattcacacttatttgggctttaagtataagagagtcttcccatacatgatgaagggtgataccattgtctgtgttcattaagctgcatggtcttcagaatggcattgctgagcttggcagggtgtctcaggcctgtaatcccagcattttgggaagccgagggaggaggatcgcttgagaccaggagtttgagaccagcctcggcaacatagtgagacccccatctctaccaaaaaatgtcattgtttttaataacttaagtataagaaccatgggatattaataaaggcacttccacttgacaattgtggtgttaattataccttagaatttaacattgtatacttttgatatatttgatgcaaaatattttttgccttcacaccatattaatgtgaattgctttctttaaagggatcccagagaacacgtatttatagctgtaaggatgtgtatcaaattatatgtaaaattactttgctctttttggctctaattacaaatgagatggcctttaattctgtgtaaagaaatagtatatttacatattgcaggataaccatgttataggtagggtaaagttaatataaatgctgaaaaggaattagtagtgtctacctagaaaaataacttctgagaagatgatttctatgaagataaacattaaggaaatcttcagaaaagggaaaaccctgtcctactttatggtgctggaattctcttcatccatagctataggacaagagccaatattgatcagtaactcatgataataaatcaccattgtttgagcagtttattaatatatttgttagacatcatgaagggacttaaatacattatttcatttaatacttataacaatttctaaagtacatatgactgttccaatttgaaagataaaataagagaagctgagatgtgtatctattttatccagtgccagtacatggtggagatattattcaaatgtgtatctttcaggcttcagactcattcttttatccactataatgtagagctttctttagtaagtcatttctctgctcaaacatggtctcggctaggaaaatcaagcacaaattgtgtacaggcaaatctttctttctgttgtgcttagaagaaacttcatgattgtcttcatcattaattttgtacaatgtgtgattgagatggcactaagtttttttatgttaagtgatttttttcttgtaagagttcgtgatcatcattatcatttgttttaatcaatgccacactgagataggtattttggttatgtaattgttaagtaattaagagttgccttataagaactacgtatctgttgtttggaagtgatataagtaagaatcgtttaacatgtaagaaaagtcagaaaactgtggtttccaatatccttgtggaacacctaaactaaatactatataccaaaaatgacacccttctttctttactgtgaataaagacagtgtttgggacaagtatagatgttgatattattatttcagggaccctgaacttggccaaaggattcaagaaatgtttacaatattgcatacttcaataacaattttaaagacatagattcccatgaaaatcttcaaatgtgtgtaggtctttcagtcttcttcagtcttattgttggctgggaagctcataacaactgacaaatgatttgtgaccaaataactgtttttacttgactaagccatgatagagcagaattagcatcacggaataaatcctataattttgttaatacagtggttggataatgtaattctaatctgttggttttggagaacctcctggggttctgacaacggtgtcaaaatttatttatgtgttttcaagaaataatagcactaggtctgttagaatatcagtggatgacgtgcactagtaagacattaaactatgcactctaatacttatatgactaacaggacatacaggcagattgtatgtcctgactgatatagtaaaagtcaggcacaaagttccttaatcttcaattgattttacaaaatcagttaacaataactgtattgaaatgacttcttggtattagcctatacccagatattaggctgatcctcaaagatgagttcaaagggcgcataatctcttcactaggggctggttgagatggtgacatctgaaatatcacagccaaaatgcaaaagatgggtcattgattcatacactatatcaaactcttttatgacttggcgtttgttcagtactactttatatattcacaaaatactgtattgttggaaattaacacctaaattaacatattgttttaattcaaatatgtgatattatcatttttccagagtaaaccttctaaggttcatttccctacctcgcaagactccacattccatgtaacatcttcatccccaattcccataataaggtgattgaggatctgttgtttccttttgttcaaaataaacctgatgtgcttcaaatatcatgttgaatatactgtcatctggtctaatgttatgttttgattagaggctactatgattgattattttacagatgcgtaatggaattaacggttataaaagttgatatgtctcctttaattttttaatacagaattttgcatttacctgaattagagttctagtgttatgacaacattgggaaaagagtaaatatgaaaaaagtagaacaaaatctcaaattaatagttgaatatatatataaaatattagcatacacatatgataactttttcatatgcccttgcagtatttttagattggagataaaccatcaaaactatagaacaaaatatttaagctagagtgatatttattctaaatcactttctactctaaaattttgttgcatcttctttttttcctcctaaatcctaagggtatatgaaaagacaaagaaaattcaagcaagttacaacttcaggcaaagaaaactctcataagcaattcctgtattttacttagcattttctatgaaattccatttccacaagcactaaggtaatttaccatttagttgaattgtttgattaattttctatgttttaagcacaatatcaggtacttacagaaggtataattaaaaatcacttcccttgttttccatgaacttctgctcccaaacccaaaattctttcaacaagaaacaaactattttcatgaatataactgaattagattaaggaaaccaatgttggtgacttggaaataccaatatggcacaaagatgttcagggtgattttatttattttataaaatgataataaaatttattttatagttgaaaagcctatttctgtcatatcattgattctgttacataaagtgctaaattttgatatctcatattatgctactatggcttacattagaaataatatatgtcaaataaaaactcatctagatcaatagacttttcctttgtggattcttttttaaaactaccaagtttgagaatatgaatatatttgtttttcatattgttctgcaatgaatataaagtcacttataatcagaaagcaattaaatgtaaataacagtaaagaatgagaactatagaaaatagatatgaaaatgcaagcccacagagatgagaatagatcatgtggaacataaacactaaagagctgcttttataaaacttcaattttttctttgagttccctagcagccaaagtaacaagggagactgaaagtaaaacaattcaaatttgatagtatttttatatgaggaacaacactttcaggaaatgtttaaccctagtttttcatgaggccaccttaacaactgaattctctttctctctcactctgtgtataagtattttagataagtaaaagaacaatgttataatgttaagtcaaacatagacacaataatttaaatttgatgttaatcgagaaatacaatgccatttccatatatatttagtttcaatatgacttataatctgaatattccataaataagcacgttggaaatatttgggggaagaaacccaaaacacgtgaaattctgtggtggtaaatgcagtgcacagtactcacagttttaggcgcaaggtgtcgctctttacttggtggaaagttcatttaaaggttggtctgaacagtgaggcactcccatacaaaggaactccatcataccggatgccaccgtttaaggatcctttgaaacttcttaagaattcaacgagatttttaacctgaaactgaagaatctggtactgtaagtgtaaagaagcttattttggaagccaatttcgtatgcgatgtttggttttcagagaaggggattgggcaccccacgactacagctctggcttctcctcctcgaattctgggaggtggggagcggccagctccactactccgtctcggaggaggccaaacacggcaccttcgtgggccgcatcgcgcaggacctggggctggagctggcggagctggtgcagcgcctgttccgggtggcgtccaaaacacatggggaccttctggaggtaaatctgcagaatggcattttgtttgtgaattctcggatcgaccgcgaggagctgtgcgggcagagcgcggagtgcagcatccacctggaggtgatcgtggacaggccgctgcaggttttccatgtgaacgtggaggtgaaggacattaacgacaacccgccggtgttctcgctcagagaacaaaagctgctgattgcggaatctaagcaatcggactcgcgttttccactagagggagcttctgatgctgacattgaagagaatgctctattgacctacaggctaagtaaaaatgagtatttttctttagattcaccaacaaatggtaagcagattaaaagactgtcacttattttaaagaagtctctggatagagagaaaactccggaacttaatttgctgctaacagctacagacgggggaaaaccagagcttactggcaccgttcggctgttagtccaagtcttggatgtcaacgacaatgatccagagtttgataaatcagaatataaggtgagccttatggaaaatgctgctaaagaaactcttgtgctcaaactaaacgccacagaccgagacgaaggagtcaatggagaggtaacatactccttaatgtcaattaagcccaatggaagacacttatttacactagatcaaaataatggagaagtgagggtcaatggaactttagattatgaagaaaacaagttttataaaattgaagtacaggctacagataaggggactcccccaatggcaggtcactgtacagtctgggtggaaatcttggacaccaacgataactctcctgaagtcgccgtgacttccttgtccctcccagtacgagaggacgctcagcccagcacggtcattgccctgatcagcgtgtctgaccgtgactcaggtgtcaacggacaggtgacctgctcgctgacgccccacgttcccttcaagctggtgtccaccttcaagaattactactcgttggtgctggacagcgccctggaccgcgagaacgtgtgggcctatgaactggtggtgactgcgcgggatgggggttcgccttctctgtgggccacggccagggtatccgtggaggtggccgacgtgaacgacaatgcgcctgcgttcgcacagcccgagtacaccgtgttcgtgaaggagaacaacccaccaggctgccacatcttcacagtgtcggcgcgggacgcggacgcgcaggagaacgcgctggtgtcctactcgctggtggagcggcggttgggcgaccgcgcgctgtcgagctacgtgtcggtgcacgcggagagcggcaaggtgtacgcgctgcagccgttggaccacgaggagctggagctgctacagttccaggtgagcgcgcgcgatgcgggcgtgccgcctctgagcagcaacgtgacgctgcaggtgttcgtgctggacgagaacgacaacgcgccggcactgctggcgactcaggctggcagcgcgggaggcgcagttaacaagctagtaccgcggtcggtgggtgcgggccacgtggtggcgaaggtgcgcgcagtggatgcggactcaggctacaacgcgtggctttcatatgaattgcagccggcggcgggcggctcgcgcatcccgttccgcgtggggctgtacacgggcgagataagcacaacgcgtgccctggacgaggcagactcgccgcgccaccgacttctagtactggtgaaggatcacggtgagccggcgctgacggccacggccaccgtgctggtgtcgttggtggagagcggacaggcgccaaaggcctcttcccggactttggcgggcgccgcgagcccagaggctgcgctggtggatgtcaacgtgtacctgatcatcgccatctgcgtggtgtccagcctcctggtactcacgctgctgctgtatacggcgctgtggtggtcggcaacgcccactgagggcgcgtgcgcgccggggaagcccacgctggtgtgctcccgcgcggtggggagctggtcatactcgcagcagaggcggcagagggtgtgctctgaggagggcccacctaagacggacctcatggccttcagccccagtcttcctctaggtctgaataaagaggaggaaggggaaagacaggagccagggtcaaatcaccccggacaggtgagttttctacagattccacctatcaggaagtgtatgtgaaattatttaaaatccagttttttttcacggattttttaagggaaagttttatgaataaccagtgttttgaatattgttttagataacaatgtctgttcataaaataccaaatgatacacatcttcagtcttttaatcatatgaataatctggcttctttaaccaataaatgtcctatttctcttaatatttggttagcaaatcctaaaagaaatgagatgcaagagtgactcttctgtagtcacttgagtagaaataattactattttcactaaagtacccatgccccttcatctctaaacttcaattatgaccataataactatggattatttaaatttgctcctctttgtcttttagcagagttttgccttgatatttccacattgttagatcaactggctttgtttttctaaagggaggaggtcttcctatgatgtccaggttggactgcagtggctatttacaggtgacctgtagcctggaactgctaagctcaaagaattctcccacttcagcctccagagtagctgggaatgcagtgccactgcacttagtccattggctttcctaacttcaggcttgtatcaaagctagaatactccattagtatgacatgatttacttttcttttttttttttacagtgttaaacgttcatcataaattcattatatatgaaacaatctttacttttgtctttattcctgtgataatacttgttttcatattgtttgaagaaaaaagttaagccttgcattcttatatgctgctttatggaaataatatgactaaaattctacatgttcttgccaggcaaagtggttcaggcctgtaatcccagctatttgggaggctgaggcaggagaattgcttgagcccaagagttcgaggcctgcctggacaacatagcgagatcctgtctctataaaaaattaaaaaattagccagacctagtggtgcatgcctgtagtcccagtttcttgggaggctgacatgagaggatcccctgaacccaggggttcagggctgcagtgacctatcatcgtgagacccccatctgaaaaaataattttttttgcctgttcttgattttgttccatgaaaaggcaagagatttgtcaactattggatactcaaacaaaatggcatgatttatgattccaaaggaaactaggtaaataaaattattcaaattatctaaacttgctaaagacatgcatatagggctatattatctataatatatgctagttggcattcttccataagtttttcagattcatctagcagagaaaaaattaaatatattaatgtgagtacctactgacaattatcagtttcattcatctcactttgtaactgctctatcttgtaatgccttatctctaatgtttttgaaattttctttccacgtagtatcatcccatctgaagatttgagcaaagatcatttacttctgagtcattcttcatatttagttattcttactacacgtagagtggtggtattacagactttcttgagaatcatatctagctatttcccccccgtatagaggcataacataccatttggcacaatattcaaagagtctatgctgaagcctattcatagactttagatcgagagcttttgtatcataatattcattggctaaaaacattctttaagtattaaagagaaggcaacaatataaaaatataaaatatttcagactcaaaagtgattaaaccatcataccacttatgaaactttataaatataataaaggtgaatattagatagggcatacattactcatctccagatgaaatttttggaataactgaagatcttttaaagacttgggaatgttttcagtacaggttaaaattttgtaaattattattttatatcacataaataacaaatttgcattttagataattcaaattacttggactgatttctgcaaagttgtgtcttttatacttaatgccaagattgcattctatggtataaaattataatttcaatttattttctagtttggttgtttaagtattaagctaaacttagatgttcctattggcttaacaatttgtttaggtcaaagagtatgtgagaactacataacacactattattatttgtttctttttgagatagagtcttgctctatcacccaggctggtgtgcagtggcgcaatctcagctcactgcaatctccacctcccatgttcaagcaattctcctgcctcagctttccgagaagctgggactacaggcatgcaccaccactcctggctaatttttgtatttttagtagagatgggttttcaccatgttggccaggctggtcttgaactcctgacctcaggtgatctgcctgcctcagcctcccaaagtgctgggattacaggtgtaagtcactgagcccagcctattttttaaaattaaagttccttagcatgtatggtacattgaccacttttgaaaatgaaaaataggaaagaaacttggtgatgatattagacaatttaaataattagcctgatgacatcaaaattcaaatatgtttttaattacttaacgttttatagtttatttaagttatcttatacttgtagagccattcttggttactctttcctggtgttgtaaaggtgtcatatttcagttgcctttattattatatgcagtaggaatgaatggcaacaaattattggtttaaagattttgacttgagtattaatagacttacaaaatctatgtgtacttgttcacaatgagttgtaggatcttatctgtttttttctcttaaagctgatcttgaattaatgaataaactcatgaaaggtcttttgatgcccccttgcataacagtcaccattctgattttctgaagagaagcatgtcctaactactaaatgacctgtaggggaagatttagagaaaaagcaaaaggttgatatcaagttcacattctcttgactttagtcaatgagattaggctccaaaaccctttaagagatctttcgcattttagtgctccattgttgctttgggatagtgtgaaatttggaggcttcaactaaacattttacattaaagtgctttacttttgctagagtaaaactttccagaatctattcctgagatttgttttaacatgttatggaaatgagagcagttatgtgaaaagttatcacattcaagcatcaaggaaccaaacaataacgctctccatatttatgatgaattctaactttcatcagatttatgaataagacaatttatataaatgaaatattgtttggtattagacatattttagtttcttatcctttgttaaatacaaattcctaactttctctaaaatcttacgatggagtgcttgtgaaggttaaaagttattgaaacagcggaattgtaagctatataaggggaggggtgctgtatattattctgtatatcattttccatgataaagtgtaggttctggcctactgtatttgaaagatttctactttgaagcagaaaacatttttaagctacagcgtaataaaattgttgatgttttgttactaatatcatgtatattaactaaacccgcatttataaatgatccgtgaaaaataacccaaagtcgaaacattagaattaagagtgacccaggaagtggctaaaccgaaaagaacctcaggatctttcttgtacttacataatcagtcacatgatgtcgctctacactcagaaggtgaaacaggaaaatttttttctccgcacccacattccaatcattcacggaataggatcgactccataatgactgtgatgctggaaaaaatttactaaatatgtacttacagaaaagggtgactgctcataaaatacctcaggcaagcgatcccttaaaactgattgtcccaactcagaggccctcattttctgcaatggtgattatcggaccaagaggcccgggatcccagcgtctgctgctctcgcttctgctccttgcagcctgggaggtggggagcggccagctccactactccgtctacgaggaggccaaacacggcaccttcgtgggccgcatcgctcaggacctggggctggagctggcggagctggtgccgcgcctgttccgggtggcgtccaaaagacacggggaccttctggaggtaaatctgcagaatggcattttgtttgtgaattctcggatcgaccgcgagaagctgtgcgggcggagcgcggagtgcagtatccacctggaggtgatcgtggacaggccgctgcaggttttccatgtggacgtggaggtgaaggacattaacgacaacccgccggtgttcagagaaagggaacaaaaggtacctgtttctgaatctgcgcctctggactctcattttcctctagagggcgcttctgatgcggatatcggcgtaaactctcttttgacctatgcgttaagtctaaatgagaattttgagcttaaaataaaaacaaaaaaagataaaagtatattgcctgaattagttcttcggaagttattggacagagagcaaacgccaaaactcaatttattgctgatggtaatcgatggcggtaaaccagaactaacagggtctgtccagattcaaataaccgtcctggatgtgaatgacaatggtccggcgtttgataagcccagctataaagtagtgttgtctgaaaatgtccaaaacgacacaagagtgatccaactaaatgcttccgatccagacgaaggacttaatggagaaatttcctatgggatcaaaatgattttgccagtgagtgagaaatgtatgttttcaataaatccagacacaggtgaaattagaatttatggtgaactggattttgaagagaataatgcctatgaaattcaggttaacgccattgataaagggattccttccatggcaggtcacagcatggtcctggtggaagttctggacgtgaatgacaatgtccctgaagtaatggttacttcactgtcgctccctgtgcaagaggatgctcaggtgggtaccgtcattgccctgattagcgtgtcggatcgtgactctggagccaatggacaggtcatctgctcactgacacctcatgttcccttcaagctggtgtccacctacaagaattactactcgttggtgctggacagcgccctggaccgcgagagcgtgtcggcctatgagctggtggtgactgcgcgggatgggggctcgccttcgctgtgggccacggctagagtgtccgtggaggtggccgacgtgaacgacaatgcgcctgcgttcgcgcagcccgagtacacagtgttcgtgaaggagaacaacccgccgggctgccacatcttcacggtgtcggcatgggacgcggacgcgcagaagaacgcgctggtgtcctactcgctggtggagcggcgggtgggcgagcacgcactgtcgagctacgtgtcggtgcacgcggagagcggcaaggtgtacgcgctgcagccgctagaccacgaggagctggagctgctgcagttccaggtgagcgcgcgcgacgccggcgtgccgcctctgggcagcaacgtgacgctgcaggtgttcgtgctggacgagaacgacaacgcgccggcactgctggcgactccggctggcagcgcaggaggcgcagttagcgagttggtaccgcggtcggtgggtgcgggccacgtggtggcgaaagtgcgcgcggtggacgctgactccggctataacgcttggctgtcctacgagttgcaaccggcggcggtcggcgcgcacatcccgttccacgtggggctgtacactggcgagatcagcacgacacgcatcctggatgaggcggacgctccgcgccaccgcctgctggtgctggtgaaggaccacggtgagcccgcgctgacgtccacggccacggtgctggtgtcgctggtggagaacggccaggccccaaagacgtcgtcgcgggcctcagtgggcgctgtggatcccgaagcggctctggtggatattaacgtgtacctcatcatcgccatctgtgcggtgtccagcctgctggtgctcacgctgctgctgtacactgcgctgcgttgctcagcgccgcccaccgtgagccggtgcgcgccgggcaagcccacgctggtgtgctccagcgccgtggggagttggtcttactcgcagcagaggaggcagagggtgtgctctgcagagagcccgcccaagacggacctcatggccttcagcccaagccttcagctgtctcgagaagattgtttaaatcctcccagtgaagtaagttattaatattatttagatatatttgtttccttgaagaacttccgtttaggttataactacattctctcatttttctttatgattctatcctttaaactatcgaatgtctcatctttcttggtcattcttactcattttgaacttttatgtatttgtctaacattaatgaaggaaatatgtaggtacaatggaggccatggagcaccacacttaatatttttctttttctataatattttatatgactgatgaaccttgaaaaaaacagtatattagattaaaaagtggccagatgtttgataacttaaaaatttaatttgttcataatttcaagattacaggtaagttgcaagaatggtacaaagagttcctagatcccattaatggattctttaactcttcctcacgtgcttaggcttttaaaatagccttcttgatcactattctaatttcagtacaatctagacattttcacattatattccaggtattatcacaataatataaatgatatgtctgacatatgatgaatgattttcttcattgctcacaaaatatcttctttatttcaagtaggaatagatactgtactattcttatttacatgaaatataataaaatcatttctcaatttaaaaatatttaaccatctgtacgatacagtacagttggtaaccaactgtggctcaaaccagtttcagatgatcccaaacttatcatagtataccactgccctgtgcctattaccaagtgaatcttctaatgtgcattttacatattttaactttctatttctacaaaaatatccagaggcttctctttaaccagggaataaagtcttacataccccagcctggtagtaaaggcattaaaatttccagccttatatctactttcttacatatctttagtttaggatctggaatatagtatatgttcaatcactttttaaaaacatatgggggtcttgctatgttgcacaggctggactagaacttctgggttcaactgatcctccatttcagcctttcaagtagctgagactacaggcaggctccaccactcccagcttcaatcaataattttaaataaatatatggtattgaaatgtattacctggacattcccctctatcttagaaatgagagtatgccctagaaatcagataatgttttattgaagagtgtcttgaaagatagacaacattttaccaagaaagtgttaagagagataagtaggaacaactgcacagtatatggtgtaattgaaggattagagcaggggagattgtgaaggcaggaaagctatttcttttttaataaattaggtatcaagtaatggagacttaaattatggcagtagaaatgaattgaaaaagacatatacaagaggcactggcaaagtagaagcagccagataatgacagactcaatacaaatgataagagaaaaacaaaagtagaagttgactctcacttttttagtttgttcagctgagaagatgacattgccattaaccaacctgcagaacaaggttggagaaacagtttgtgtgtatttgagcaggtagggaatggagatgaacatttaagaaaatgttactttgaagtcctaagagaataccgttgtgattggaaatatgggtctggatctcagaagagattattgatatagattttgggaacaactcctttagagaaaaaaataatccatgaaagaataaaattgccaagacagacattgaaaagtgaaaaacaatgtgtccaggtacttaggtgggtaagtgtgtcgcttcctgtggctgctataacaaacgaacacaaactgggtgctgtaaaacagcaaaagtttattatttctcagtattggagaccagaagtccaaaatcaaggtgttgtcaaggctatactctctttggaggccccagggaagaatctggtttttgtttcttccagtttctattggctgttggtgttccctggcttgtggctgtaccactcccatctcagccttctcagctttcatggtcacattgcctcctcctctccatgtctctctctatgtgttggttttacaaaggtacatgtgattgtatttagggcccatctggataatccaggataaactcctttcaagatccttaacttaatcatattattcaccatataaagtaaaatccacaagttccagggattaagatgtgggcataactttttggggaccacaattcaacctattatagtaggcttaaaatcatagaaggatagacaacaggaagctgaaataaagctcaaagtgcaatatatcaagtatatgttagaagttaaacatgaagggaaaaagataaacagaagaggttttccaccagaagtagaacatttaaattagtgtatgtgcgtgtgtgtatgtatacatattttagttaaagaagtttgactatcttcatagtgtgagtgaaagaaacaagtaaaaaataagatactaaaaataagacaggcagcaggtgaatttagatgaaaaccatgagagaatagaaaataatttttaagagcatatggttgaccttaaaagcgggaacagtttttccttacaactagtagaaaatgaaaacagataatataaggaaaaatgacacaagaagagagcaattgaatttctgtttggtcacatctctcaatgtgtgaatcatctgaaagtgaactgatggaaatgaggttgagaatttgagaagagaggaaagagaatatggaagaatctctgtaagcaagagggaggagttaattatcaattcacttgagagcccaactgaggtaaaggtgagagtaaatttgaagagaatagtcatggttaagtgacaatgttgagcagcttaataggaagcatagagaaaatggattgtcagtgtaactgcgtgttggaggctaaaaagaatgttagaggagtaatataaataggtgaatgactctagagtgtctggaagggcatattttaaatggttgactatgtagtctaattatgtgaagaggtaaataaagaaatgtagggccagatagaaagaattagaagagaaatactatgttagtaaaagtaatggagcaggagaggatgatgagggtaagagaataccaaatactctgcctaaattttcagaggagagcagagctatggaaataaacccaacagtcatttcctatagagttgtgcacagaacaggccagataattattggagctatgatatatttttcattacaccatttggcctgggattttgtggcttggtagagatagttataacaatagataaaagtaagatcctcttcctcttttccttgctaaagatatgttaacatctttgtctagctgttgtttcttggaaaattaaagtcaatttaaatgacggcaaggttttactcagtgatgatgaagtaagatggagagagaaaatggaaactttaacctcctggttaaattctatttaaccaggacgccgattcgggctacaatgcgtggctttcgtatgaattgcagccggcggcggtaagttaaattctattaaatcaataggatattagttccaggcatattttataaaaacagaatccaaaaccttagagcattgttgtggctaaattattgtgtttatgcacatacacacactcacatacaaaatcccacacatattgactgaacactttcttttgaatataaatatcttatctacatctcaagtcacattgagggaaatttattaatatgatgtgcttattcaaaatctgatatatcagttaccaatatttttcaccttcaccgattttattcttatgtgattgttatgtttccttttggagtcaatggctgttgtgtgaggaggtcttgaaaaatattacaggaagaggacagtaccacaaaaacctacatgactatgcagaactaccgatcaattgtcccaaaacgagtgtcgaatattctttgtcttaaagttctgcatggaattcttacacatggaaaaataaatttgtggcaaaatgaaactcatcaaccaattgtcagctaatataaaatgttgagcagaatgcagtgatttgctgtttctgggaaggtaaacatttaatcttcaattacatatttgcagtgaaaatgtcaggaaatgcaaggggcaaaaaaatactacatcaatggaaaatatgaagactgagtcatacttacacttacacgttcatgcgcatggtgtcgctcttcactgagaacgtttccgcgaagaaagccgccgtttctttcttcctgcagaaaatatagcagaaagcggaatacctcttgcgaatccttccgcactaggaagccataaaaattgggccttgagagacagtttgaggtaaggcgttgtatatattgcagatagctctgaggtttttggagtgtaccatgctgtcttcctggcaaggaggcccaagaccgcggcaactactgctctggcttctgatcctcgcagcctgggagacgggtagtggccagctccactactccgtccccgaggaagcaaaacacggcaccttcgtgggccgcatcgctcaggacctggggctggagctggcggagctggtgccgcgcctgttccgggtggcgtccaaaagacacggggaccttctggaggtaaatctgcagaatggcattttgtttgtgaattctcggatcgaccgcgaggagctgtgtgggcggagcgcggagtgcagcatccacctggaggtgatcgtggacaggcctctgcaggttttccatgtggaggtgaaggtgagggacattaacgacaacccgcccatattccctgaaagcaagaaacgaataatcattgcagaatctagacctccggaaactcgatttccactagatggcgcatccgatgcagatattggagtaaactcggcattgacctaccgactggatcccaacgattatttcactttggacgcacaaaacagtcttgagcaaatgtcttcattatcacttgtactgaggaaaacactggacagagaggaaattcaggaacatagtttattactgacagccagtgatggaggtaaacccgagctgactggcacagttcagctgctcatcacgattctggacgtgaatgacaacgccccggaattttaccaatccgtttataaagtgacggtgttagagaacgccttcaatggaacattagtgatcaagctaaatgccacagatcctgatgatggtacaaatggagatatagtttactcatttagaaggcctgtatggcctgcagtggtatatgcatttaccataaatccgaacaatggagaaattaggacaaaaggcaaactagatttcgaagaaaagaaattatatgaaatatccgtggaggcagttgacaaaggaaatattccaatggcgggtcattgtacccttttggtggaagtactagatgtaaatgataacgccccagaggttaccatcacttctttgtcactccccatcagagaagacactcagcctagcgccattattgccctaatcagtgtgtccgatcgtgactctggctcaaatggacaggtcacctgcaccttgacgccgcatgtccccttcaagctggtgtccacctacaagaactactactcattagtgctggacagcgccctggaccgcgagagcgtatcagcctatgaactggtggtgaccgcgcgggacgggggctcgccttcgctgtgggccacggccagcgtgtcggtgggggtggccgacgtgaacgacaacgcgccggcgttcgcgcagcccgagtacacggtgttcgtgaaggaaaacaatccgccgggctgccacatcttcacggtgtctgctcaggacgcggacgcacaggagaacgcgctggtctcctactcgctggtggagcggcgggtgggcgagcgtgcgctgtcgagctacgtgtcggtgcacgcggagagcggcaaggtgtacgcgctgcagccgttggaccacgaggagctggagctgttgcagttccaggtgagcgcgcgcgactctggcgtgccgcctctgggcagcaacgtgacgctgcaggtgttcgtgctggacgagaacgacaacgctccggcgctgctgacgcccggggctggcagcgcgggaggcacagtgagcgagctgatgccgcggtcggtgggtgcaggccacgtggtggcgaaggtgcgcgcggtggacgccgattcgggctacaatgcgtggctttcgtatgaattgcagctggcggcggtcggcgcgcgcatcccgttccgcgtggggctgtacactggcgagatcagcacgacgcgccctctggacgaggtggacgcgccgcaccaccgccttctggtgctggtgaaggaccacggtgagcccgcgctgacggccacggcaacggtgctgttgtcgctggtggagagcggccaagcgccacaggcttcgtcgagggcgtcggcaggcgctgtgggtccagaagcggcgctggtggatgtcaatgtttacttgatcattgccatctgcgcggtgtccagcctgttggtgctcacgttgctgctgtatactgcgctgcggtgctcggcaccgcccaccgagggcgcgtgcgcgccgggcaagcccactctagtgtgctccagcgcggcagggagttggtcgtactcgcagcagaggcggccgagggtgtgctctggggagggcccgcataagacggacctcatggccttcagtcccagccttcctccttgtctgggttctgcagagggaacaggccagagggaggaggactcagaatgcttgaaagaggtaagcttatattttaaaaaattgtcttagtaaacactttagccttccttgcagttgtttgtttaagacatctttcctgccaatttcaaattattctttactttaattttaattttgctagttgttatcgaatttaacaactctgctgtggacattatgtgttggattatccttcagagtgaaatcttaactcacaaaccataatgaaatgtgcaaaacaagaatattttgtttctgttgtattcttaatagttctaagtatttatcttgcaattgagcatttacaaaaaattcctcacgttgtgagaacttaaacatttagaaaatgtttgttttaatgaggctaatcgtaatcttaaatttaaaaaatttttagtttaatgtatacatatacccacaagatattattttaaagagccccataacttttcacataaatgctttttttaagtgcacttttctttctttctttttttaaactgttttgattgtctctacttttttgtcctctaggcacatcagtgttcccctctcatatatcccatgaaaaatatcttgtgattctgctttcaattttttatttgcattcagataattactcatacatatatatatacatatatagagagagacctggtaggctttttgttattatttcttttccaaagtttgaagggatttccaaaaggtactggtgactgaaagtaccttttggcagtccctgcaaatctaatggttttaatagctgtgtagtattccacagtgtaagtgtgcaattatatattatttacctaatgatgggcaatcactttgtgtcaagtgttctgttatcttcatgaaccatgctgtgctatcatttcatatatttcccaaaatattggtgttatttctacgaaattgattgtcagatgtggaattgatgcatcaaagatattaataattttaattataaaatatgtcactggattgccttccaagtattttggaaccaaccagttatgagcactctttctatctcaagaagcaatagtggttttactttctgctaatgtgatctctgtgaaatgatatttcactgttactttaattttaaattcctgtatagtattagtgaatttgagcatattgtcatatgtattttgttgatttgtatttgatcttctttgatttatccattaagttatttgcctacttttctattgaaaaaaaatttttagtttcagtttggaaaagttctctgtaccttatagatattaactgtttatctattttttgacatttttaattaaaatttttattttgagataattatagattcgcatgtggttgaaagaaatagtaaagggagatgctatgtattcttcactaagttttccccaatagtaacatcttacaaaagcgtagggccataccacaacctggatattgacattgatacagtaaagaagtaacatagttccgtaacaaccagattcttgatatcacctttttatagccacatctgcttccctgcctaatgctggcaagcagtaatctgttctccatttctctaattttgttacttttacttcagaaataaataaaagtatctctatttatagataaaattttttaaaattatttttatatttatttattttttattacactttaagttctgggatacatgtgcagaacgtgcaggtttgttacataggtgtacatgccatggtgtgcttatctattatctgcatcacaaatatgttttcctcctatattatttctattcatttgtttgtactaattttgtcatatataaatgtttttaaaatgtatgaattaaaatatatctttttccttttatggattttaaggtctgcatattcagttagaaaggtcttcccagctgggcacggtggctcacgcctgtaatcccagcactttgggaggccaaggtgggcggatcaggagatcaggagtccgagaccagcctggccaacatggtgaaaccctgtctctactaaaaatacaaaaattagcgaggcatggtggcacgcgcctgtaatcccagctacttgggaggctgaagcaagagaattgcttgaacccgggaggtggaggttgcagtgagatgagatcatgctactgtactccagctctgggtgacagagcaagacttcgtcttgaaaaaaaaaaaaaaaaaaaagaaaggtcttcccaactcctatattgaacattcattaattaaatgcatttaataaatacttattgagtgttctctatgtgccaggcatgttctacacattagacatttagcaacgaaatttattattttgtaaatccaaatttccagttggtatcactttcctactgcctgaaaaatttctttaatattttttatagtgcatatgttctggcaacaaattcactcagcttttgtctgagaaatatctttatctctttttttttttttgagacggagtctcactctgtcgcccaggctggagtacagtggcgtgatctcggctcactgcaagctccacctcccgggttcacgccattctcctgcctcagcctcccgagtagctgagactaccggcgcccgccaccacgccctgctaattttttgtatttttagtagagatggggtttcatcttgttagccaggatagtctcgaactcctgacctcgtgatccacctggctcggcctcccaaagtgctgggattacaggtgtgagccaccgcgcccggctctttatctcatttttatttttgaaaaagtattttcactgggcatagttgacagttttttaaaagatataattcagttgtcttctggcttgcatagtttctaataagatgtttgcttttttatatatgagtcttcctctccccacccctcatggttactgttaaaacttttctttttatcctgacttttgcagattgattgtgatgtgctttagtatggttttctttatgttagtctgttggggtttgttgatattcttggatctgtggatttatcattttcatcaaattcaggaaaaaatcaaccatacttcttctaatagttttttctttccttccatcctttctgagactccagtaacacatatgttacaatgacacaggtcattgaagcgttctttatttttgtccatttctttctctgtgcctcattttgaatatcttttattgacatattttccaagttcactaatttttccttttgtagtatcatatctgttaatcctaaacagtgtattcttcatttcagagaccatatttatttcttatctgtataagattctttttgtctcttttaaaatttattttacatgtctccaccgaatagtcatctttttatctatatgtttgagcatattagtacatgtataatagatgttttaactttcttgtctgctaatttcaacatttttgtccttagtttgcttcttttaatctatcttcttctatggatatattttcttgctgttttgcatgactggtaatctctaataagatgctagacattgtgaattttacattgtcggatgctggattttgtgtgtgtgtgcatgtgtgtgcgtgttcctttaaagcagtagttcttgataagaaacagttttgtcccctctaccccctacccaggagataatttggcaatgcctggatacatttttggttattacaactagggaattgctactggcatctaataatggagctctgagatgctgctaaacaccatccaattgctgccaaacatcctaccgtgcacaggacagccgcccaacaataaagaattagctcaaaatgtcagtagttccactgttgagaaactctgctttaaagagtcttggacttagttctgacgtgaagttaagttgctcagtaccaatttattcctttcaaggcttcattttaagatttgttagtacacattcagagcagcttttagtgtagcactaattcggccttctattacagcaatactttcctgaggacaccacctaatgccctgtgcattaagaggtctctcttctctgattggtaggaatgtgaaatatttccagccctttgtgagctctaggaattattctacccacttttttttttaattttgaagggatagcctgatctggggaggttgatcagtgatctgtgatctgtgatcacatcactccactgcagcctggtgacagagtgagaccatgtctcaacataaaaattaaaacattagaattgaggtttaatgttatcaaatattttatctgcatcttttgagggaggtataaattttttctttggcaatgttaatgtgttgaatttatgatttatgattttcttatggcaaaccaacctctacttccttggataaccgtaatttgattataatttataatccttttaatatactacttattttgttaaattttcaaaacaattttttcatctttattccaggtgatactgatatgtcctagtttttcttcctaatttcttctttgttaagtattcaagttataaataagaatctagcataacttgaatacttaacaaagaagaatagtctttgaaaacttccagaaaattttctgtttcctgtaaaagtttgtataatctttgaattacttcttatttgattggagaactcactgttgaagttatctgtatcaggattttgattggtgggaatatttctgattactgactcaattttaatagtataaggaccattcagagtttaatttactcgagtcagttacgtagataatattttttcaggtattttcctgtttaatctaaattttcagttatatgctcatactttctacagaatctatagtgatatttccctttccattcttgatattatttttgcttcctgtctaatttacttttcttcagaattctgctttctgatttttgtttttgctttgaaatatttttatattaattatactgattcatttctcttcttttcatttgtgtttgcaggagatgtcctcttcccagccttttattttaaaccttttagtattatgggcatattccacaagttctttgctactgtctcactgagtagcagagtctaatttttctttccttgaactttgactggtcttaatattggaagtaacattctgggatttatgaagtcaggtcataagaagtcttacagtatgctttggtctctgagaatatttgttttgggggaagcctgccaccatgtaagaattctgactaccttgagattgtcatactgtaaagaagctcaagctggacttgtgagaagccaaatggatagaaaaattactatccagtctccagttgtcttagctttccaagcttaggtgccagaaaaatgtagaaggcttcaggtgactgtagtgtgttggagctggctcttttactggcttatgagaactgataatgcaaatttattcccaactctggattcaatgatgtcactttggtagcttgaaattggccatggtaggagtatttctgccacagaaataggcaaatgctacaaaacagagttttttgtttttcttttttcccagagacctagttgttaagcatttaccagtacactactgcacctgattgcaagcaagaaccactcagttgagtcagaaccaggagaggtaatattaagttgttttaagatattaggtagttgggatggtttactatatagcaatggataacctgaacaagtactctttcttagataatctataaattttaacttgaatatttatttagtttatatttacaatacctagtgatatctttaggcacaaatatttcaattttttgtgcgttatttttgtctcaccatttttatgtctctatttccttcctttgttgatcttcttttgaaatgactgagtactttttattgttccatttccttctgtattatttggaagcccttttccgaatagctagtgcttaccctagaaaattaagcatgtatccttgatatatcaaaatcaaaagttaactgaaacccttcctccttctgggaaatgcagggaccttacatttttaaaatctttttaatcccttttgacttatatactatttctgtcatgctttaaaaatattttaaaaccccataagatattagtattattttatacaatcaacattgttttaaatgtacttacatatttaccagttttgtttctcttccttacttcttgcccctctgacctttcatcagggattattgtctttccatgttagaataatttgagagtttcctttagtccaaagatgctggtgaggaatgatttcaggttttgtttttctgaaaatgtctttatttcatcataattattgaaaagcattttttctgagggtataatcttaggtgtgacccccacagcacatagtaaatattattccagtgtctactggtttccattgttgctgtcaagaatttagctgtcaatctaaatgtcattcctttaaaggtattctgtttattttcctttggctgcttttcagattttctgtgtgtctgatattttgcagttttaccatgctgtgtctttataatcatcctgttctggattcagtaggattttttttaatttttaatttttccgtaagttattgggggtacaggtggtatttgattacatgagtaagttctttggtggtgatttgtgagattttggtgcatccatcacctgagcagtatacattgcaccatatttgcaatcttttatccctcgccaccccccactcttgcccccaagtccccaacgtccattgtataggatttttgaatttgtgaattaatgcctttacatcactttgagcatatcctcagctataatgttctccaatgttgcttctgttccattgtatttctatagtattattttagtactctaattaaacatattttaatcttattactctatcccatctatttctaccttttattttaacaccttttgctctttgggctttattgtggatagttcacccaccttaaagtttaataattctctcttcttgctgttgtctgaatttgtacccccaaattcatgtgttgaaaattcaatcccttatacaacagtgttgggaggtggggaatttcaggaaatgtttagattatgagggatctgccctcatgaataaattaacggcactgtaaaaggacttgatggaaggagcctgtccctctcttatgcttttggctctgtcatgtgacgatgcagcaagaagatcttcaccagatgctggtgccttgatcttggacttcccctaggctccagaattgtgagaagtaaatttccgttctcataaattactcagtctgtggcattctgttatagcagcacaaatggtctaagatacttttatttattctttttcaaatttattgttactttgtataatttctagtttcctctcgaaactttcaagcttggcatttatatctggaacacaataagctcatggttttagcgtctatttctgatatgtccagtaactgggatcctcatgggtctattcctgtggtgtgttttaaaattgtatctttatggtgttttgtctccacataaacctggttatctttgattttgtgctgaaagttgtattaaacacttcttcctggaaataatttggggcttataacattttctttctccagaatggattttaattgacttttgccaggcatcttggggcactagcaatcatgggtaatcttaatctatttcaagcttcaggtattctagataaaacctcattatctaaaatttacatgtattctttaagtacggttattcagtttcctagccaaacatgagagattgtttaagaagttccaccatgactggtagactcaggattctgacttttgtttctctagtccttggagactgtcaaaagtatatctcagtattcattcacctatttttttccttttatttccagttggtacataataattgtacatatttataggatacagagtgacattttgatacatatatacaatgtataataataaaatcagggtaattagcatattcataatctcaaacatttaccatttttgcatggtgaacatttaaaatccactcttctagcttcttgaaaatatgtaagaaattatagttaaccatatttatcctacagtgctacagtgctgcaaaacaccacaacccattcctcctgtgtagctataatttcgtatccattaaccaacctttccccatcctccttttccttcacccttcccagcctctgataagcacaatactacttccatgagctcaataaaattttgtagctgccgtataagtgagaacatgtatttatttttctgtgcctgacttatttcacttaacatatgccctccaggctcagccatactgccatgaataacaggatttcattcttttttatggctggataatattccgttgtgcatatacaccacattttctttatccactcatctgttgatggatattgaggttgattccacatagtagctattgtgaatagtgctgcagtaagtatgggaggtgcaggtatcactttgacatactggtttccttttctttggataaatgcccaatagtggaattgctggatgatatggtagttctatttgtagttttttgagggactcccatactgttttccttagtggcagtgctaatttacatgcccaccaacagcatttatgggacagtggctcatgcctgtaatcccagcacttagggaggcagaggcaggaagatcgcttgaagccaggagttcaagaccagcctgggcaacatagcaagaccctgttcttcacaaaaaagaaaaaaaaagcagttgtagaactcctttaagtatttcttgtaggacttatctagttgtagtgtacttcctcagtttttgcttgtttgggaaatactttatttctccttcatttctgaagtatagctctgcttggtatagtatttttggctgatagttttaaaaaatttcagcactttggatatatcatctcattctatcctagcctgtaaagcttctgctgagaaatctgctgttagtctgatgggaattttcttataggtgacttgtcacttttcttttaccgtttttagaattccctccttgtcttgagtctggtaccgtagactactcagccatcctgatgccctacctcttgtatagaaacaacccagatccaaagtggccagaaagttactttaccttctgaatttgtggtctttttcagaatctctacctgttaattctgcatgactttattagtcattagatacttttataattttaaaatatctccaattgtatggttggttcaaattaccagttctgcatactggtaatgtaagtcctctgttgaattgatttttaaatacatttattttattccagtatcttctagctcctggtgttgcagatgagaagtttcaaataacttgaaataattcccttctatgtaattatccctgattttgactttctttccatagttatatattttttctatgctattatattctcattttaaagatgttgaatgacaatgtaattttcttttctttacaagtggtagcttatttacaagtatttttgaagtttattttcctggaaagttttcttaaattatagattttagtatttcttctgttttattacttcagatttcttcttcaatggctccaattatatttgtattagatattctttgcttttcttttgtagctaacactcctaaatcctacctagctcttttttaaaaaatattttactttttattcttgttttcatcttatagttttctttaggcattatccatagtgtttatatgctgttatgtgccttctggtttagtgtttacttctgaaaaaattattttccttttttttaatattttactgagttttctcatctctcttttcaaagcttttcttctccaatcatatcattactgagtctctctaattctgatttgtgtattcttgcatagcttttcattattttctaaaaatgtttaagttgttttcaaatattacgtagcaatttgtggaattttttttcttgtgtgtatttatttcctttagtgtaattatttgtcctctcctttaaaaataattttatatcagatttgcccataatccttttcttatgctcatttttatatgaaaagtgctcccccataattttagaagaaacagaccaggataattttcctatctttgttgctctatagatttctattcagctattgtcatgaaatgataaaaatataattttttaatgtcttactttgtgacatcctttaccctttttacttggacctttttcctttgtttaattgtcccccacccacaccattctgcttcatatggactcaattcctatcagttcctcctcagtataggggtttttgctacaagaagacatttgttagttgacaagttcatagggctaagacaggtttagcacaatccaatctatttgtagtcccttctgctaagttttgaatttgcttttatttctaatattttactgagttttctcatctctcttttcaaagctttcttttttttcttactcagggataattgaattaggaccttcgatttccccccttccacccatgactattgttctcaaattgttttactatgctttccagtgagtacttattggcactttttggagttcttcaattctcaacaccatcaaaagccccataaccttcttttgcttcctcctgagactcttttcatgtgcttattggtcatttctttatcctcttcggagaaatacctattcagaacttttgcccaatttttaattggtttattcgtttttcaattgttgagttgtaagagttctttatatattctagatgcaattactttattagatatataatttgcaaagattttctcattgagggtgttgtcttttcacattcttttttagctcccacttataagtgagaacatgtagtatttggttttctgtttctatattaattcacttgggataatggcctgcacctccattcaatgggctgcaaagggcatgatctttttctttctttatggctgcatagtattcaatgacgtatatgtacaatactgtattgtattgtattgtatttttttcagacaaagtctcactcttgtaccccaggctggagtgcaatggcgcgatctcggctcactgcaacctccgcgtcccgggctcaacaattatcctgcctcagcctcccgagtagctgggattacaggtgcctgtcaccaggcctagctaatttttgtattttaagtagagacagggtttctccatgttggccaggctggtctcgaactcctgacctcaggtgatccgcctgcctcggcctcccaacatgctgggattacaggcgtgagccactgtgcctggccaatgtactgcattttatttatccagtgcaccattgatgggcatttaggattattctctgtctttgctattgtgaatagtgccatgatgaacatacacatacatgtgtctttatagtagaatgacttatattcctttggttatgtacacagttatgggatttgctggcttgaatggtaagttctttgagaaatcttcaaactgctttccacagtggctaaactaatttatattcccgccagcagtgtataagcattcccttttctctgcaacctcaccagcatctgttatttttgactttttagtaatagccattctgactggtgtgactgcaacctccacctcctgggttcaagcggttctcctgcctcagcctcctgagtagctgggactgtgcaggcacacaccacaaagcccagctatttttcttttttttttttgtattttaagtagagatggggttttgacgtgttggccaggctggtctcgaactcctggtcttaagtgatccacctgccttggcctcccaaagtgctagtattacaggcatgagtcactgtgcccggccctttgcccattttttgatgaggttgtttgttttttgcttgttaatttgtttaagttccttatagattctggatattagacctttgttggatgcatagtttgctgatattttctcccatcctgtaggttgtctgtttactctgttcatagttgtttttattttttaattttatgggtacataataagtgtacatatttatggggtatatgagacattttgatacaagcatgcaatgcacaataatcacatcatggaaaatggaatggccattcccttaaacatttattctttgcacaaacaaaccagttatgctcttttagttatttttaaatatacaactaaattatttagaccatagtcaccctattctgctgtcaaatactatgtcttattcattttttctattttttatcctcattaaaaatctccactttctgtccacaccccactaaactttctagcctttgttaaccattcttctactgtctatctccatgggttcaaaaaatatatttttttattatactttaagttttagggtacatgtgcacaatgtgcaggttagttacatatgtatacatgtgccatgctggtgtgctgcacccattaactcgtcatttagcattaggtatatctcctaaagctatccctcccccctccccccaccccacaactgtccccagagtgtgatgttcccttccccttcctgtgtccatgtgttctcattgttcaattcccatctatgagtgagaacatgcagtgtttggttttttgtccttgcgatagtttactgagaatgatgatttccaatttcaaccatgtccctacaaaggacatgaactcatcattttttatggctgcatagtcttccatggtgtatatgtgccacattttcttaatccagtctgtcattgttggacatttgggttggttccaagtctttactattgtgtatagtgccacaataaacatacgtgtgcatgtgtctttatagcagcatgatttatagtcctttgggcatatacccagtaatgggatggctgggtcaaatagtatttctagttctagatccctgaggaatcgccacactgacttccacaatggttgaactagtttagagtcccaccaacagtgtaaaagtgttcctatttctccacatcctctccagcacctgttgtttcctgactttttaatgattgccattctaactggtgtgagatggtatctcattgtggttttgatttgcgtttctctgatggccagtgatgattagcattttttcatgtgtcttttggctgcataaatgtcttcttttgagaagtgtctgttcatatcctttgcccactttttgatggggttgtttgtttttttcttgtaaatttgtttgagttcattgtagattctggatattagccctttgtcagatgagtaggttgcgaaaattttctcccattttgtaggttgcctgttcacgctgatggtggtttcttttgctgtgcagaagctctttagtttaattagatcccatttgtcaattttggcttttgttgccattgcttttggtgttttagacatgaagtccttgcccatgcctaagttctgaatggtaatgcctaggttttcttctagggtttttatggttttgggtctaacgtttaagtctttaatccatcttgaattaatttttgtataaggtgtaaggaagggatccagtttcagctttctacatacggctagccagttttcccagcaccatttattaaatagggaatcctttccccattgcttgtttttctcaggtttgtcaaagatcagatagttgtagatatgcggcgttatttctgagggctctgttctgttccatttatctatgtctctgttttggtaccagtgccatgctgttttggttactgtagccttgtagtatagtttgaagtcaggtagcataatgcctccagctttgttcttttggcttaggattgacttggtgttgcgggctgttttttggttccatatgaactttaaagtagttttttccaattctgtgaagaaagtcattggtagcttgatggggatggcattgaatctgtaaattaccttgggcagtatggccattttcacgatactgattcttcctacccatgagcatggaatgttcttccatttctttgtatcctcttttatttcattgagcagtggtttgtagttctccttgaagaggtccttcacgtcccttgtaagttggattcctaagtattttattctctttgaagcagttgtgaatgggagttcactcatgatttggctctctgtttgtctgttattggtgtataagaatgcttgtgatttttgtacattgattttgtatcctgagactttgctgaagttgcttatcagcttaaggagattttgggctgagataatggggttttctagatatacaatcatgtcttctgcaaacagggacaatttgacttcctcttttcctaattgaataccctttatttccttctcctgcctaattgccctggccagaacttccaacactatgttgaataggagtggtgagagagggcatccctgtcttgtggcagttttcaaagggaatacttccagtttttgcccattcagtatgatattggctgtgggtttgtcatagatagctcttattattttgagatatgtcccatcaatacctaatttattgagagtttttagcatgaagggttgttgaattttgtcaaaggtcttttctgcatctattgagataatcatgtggtttttgtctttggttctgtttatatgctggattacatttattgatttgcatatattgcatcccagggatgaagcccacttgatcatggtggataagctttttgatgtgctgctggattcggtttgccagtattttattgaggacttttgcatcaatgttcatcaaggatattggtctaaaattctcttatttggttgtgtctctgcccggctttggtatcaggatgatgctggcctcataaaatgagttagggaggattccctctttttctattgattggaatagtttcagaaggaatggtaccagttcctccttttacctctggtataattcggctgtgaatccaatattttgttttgtttttcctttttgagacaggtcttgctgtgtcacccaggctggagtgcagtggtattaacagaactcagtgcagccttgacatcctgggctcaagcaatcctcctgcctcagcctcctgaatagctgggaccacaggcatgtgctgccatgcccagctacttttttgattttttttgtagagatgaggtctcactttgttacccagtttggccttgaattcctgggctcaagtgatcctttaacctcagcctccaaaagtgctgcagttacaagcatgcgccaccatacctggccttgttttgatttttaggtaccacaaataagtaagaacatacgatatttgtctttctgtgcctggtttatgtcacttataatgacatccagtttcatccaggttgttgcaaatgactggatcttgttttttttatggctgaatagtactccattgtgtatatgtaccacactttcttttctgtttttttagacagtctcacttttgtcgcccaggctggagtaccgtggcgcaatcttggctcaccgcaacctctgcctcctgggttcaagcgattctcctgcctcagcctcccaagtagctgggattataggcacgtgccaccacggccggctaattttttatttttagtagacacggagtttctccatgttggtcagactggtctcaaattcccagcctcaggtgatctgcccacctcggctttccaaagtgctgggattacaggcgtgagccacggcaccggcccattttctttacccgttcatctgatgatggacatgtagattgcttccaaatcttggctattgtgaacactgctgcaatgaacaatgggagtgcagttatctcttcaatatactgatttccgttcttttggaaagaaaggaaatcctacctagcagtgggatttctggatcacttggtagctctatttttggctttttgaggaaactccaaactgttctccatagtgcttgtactaatttacattcccaccaacaatgtacaaagtttccctttttttcacctctccagcattttttattgcctgtcatttggataaaagccattttaactgtggtaagatgatatctcattgtagttttgatttgcatttctctgattatcagtgatgttgagtatcttttcctatacctgtttgctattagtatgtcttcttttgagaaacatctattcaactcttttgcccattttaaaattagattattagatttttttttctatagagttgtttgagctccttctacattctggttattcatcacttgttagatgggtagattgtaaatattttctctcaatctgtgggttgtctcttcactttgttgattgtttgcttttctgtgcagaaggtttttaagttgatgtgatcccatatatccatttttttcctttggttccctgtgattgtggggtattactcaagaaatttttgcccagactgatgttccggagagtttccccaatgttttcttgtagtcgttttatagtttgatgtcttagatttaagtctttaatccattttaattcaatatttgtatatggtgagagataggggtctagtttcattcctctgcatatggatatctagtttcccagcacagactgtcttttctcgagtttatgttcttggcaccttcatcgaaaatgagttcattatagatatgtggatttgttttttggttctctattctgttccattcatctatgtgtctgtttttatgccagtgccatgatgttttggttactatatctctatggtataatttgaagtcaggtaatgtgattcttccggttttgttctttttgctcaagatacctttaggtattatgggtattttgtagttctatatacattttcagattgtcttttctatttctgtgaagaatgtccatggtattttgacagggattgcattgaatttgtagattactttgggtagtatgaacatttttacaatattgattcttccagtccataaacatgcaatatctttccatttttttgtgtcctcttcaatttctttcatcagcattttatatttttcattgtggagatctttcacttctttggttaattcctaggtatatttagttttattcgtggctatcgtaaatgggattactttttaatttcattttcagattgttcactgttgggacatatagaaatactactaatttttgtatgttgattttgtatcctgcaactttactgaatttattgttttaatagttttttggagtctttagatttttttaaaactgagattatatcatctgcaaacaaggataatttgatttcttcctttctaatttggatgtcctttatgtcttctctctctctctctttcttttttttttttttttttgagatgaggacttgctttgttgcccaggctggtctcgaactcctgggctcaagcaatcctcctgcctcagcctcccaaagtgctgggattacaggtgtaactcacttcgcctggcctaggaagccctttatttctttctcttgtctaattgctctagctaagagtactatgttgaatactatgttgaataacagtggtgaaagtgggcatccttgtcatattctagatcctagagaaaaggctttgagtttttgcctgctcagtatgatactagctgtgagtctgtcatatatggtttttattatgttgaggtatgttccttctatacccagatttttgagggtttttaagatttcaatagttttgggaaacaggtcgttttcagttacatgggtaagttatttagtggtgatttctgagattttggtgcacctgtcacccaagcagtgtacaccgtacctaatatgtgtagtcttttatctttcactcccctcccacccttccctccaagtcccccaaatccattatatcattcttatgtctttgcattctcatagcttagctctcacttgtatgtgagaatatacaatatttggttttcgatttctgagttacttcacttagaaaaatggcgtccaggtccacccaagctgctgcaaaagctattattttatttagtttatggctgagtagtattgcatggtgtatatataccacattttctttatccacttgttggctgatgggcatttaggttggttccatatttttgcaattgtgaattgtgctgctatcaacatggcttgcacatgtgtctttttcatgtaatgacttcttttcctttgggtagatacctgatagtggcattgctggatcaaataatagctctacttctaaatctttaagaaatctccaaactgttttccatagtggttgtgctggtttacattcccaccaatagtataaaagagtgtccttttcaccacattcatgccaacatctattactttttgatttttaaattatagtaattcttgcaggagtgaggtagtgtctcattgtgcattaggaaatttagtatacaataaagacagcatttttattgaggaaaggatgcattttaaaaaacaagtttttcaaaaatatagggaggattgtggttacttctagaaacagtagtgcagtcaggaaaaattcagcacaatatgtatcagtggaattcatctgatcaaacttaaaatattattccttgcattatagttctgagcaggtaccatagataatagttctattgtgttgttcactttaaactagagcaagaaacttttctaataagtggaattgggagctgtctagctggtgttggcctgataaatgcttaatacacatgaatgtgcatgcatatgtatgcatataccatatacatatattataaatttaactgatataaaagatgtttggtaaatagtttaaaatagtaataaaatatacaattctccctattatcaattattacagaatgtttcccttgatttttgctgaacttttctatccataaactatctatggttgtaattgacaagtatagttctcacatgaatgtctgttggtattttcatttatcttaacaaataatatagagtaaaatgacaaagacattgaatcttgacctgtttgtcaatgatgtgacttccttgctgcattggataatacctcttaaatactggaaaattatttgttgatttttggtctattcacaatgtaacagctacaaatatgatacactttaaaaaataatggtataatttaactttttaatttttttatttcaatgggtttttggggaacagtatttggttacatgaataactactttagtggtcattgctgagattttggtgcacccatcacccgagcagtatacattgcacccagtttgtagtcttttattcctcacccccttcccaccctttccccctaagtccccaaagtccattgtattatacttatgcctttgcatcctcatagcttagctcccacttatgaatgagaacatgtggtgtttggttttccattcctgagtttcttcacttagaataatggtctccagttccatccaggttgctgagaatgccattatttcattcctttttatggctgagtagtattccatggtgtattatatatataatacatatattttatatatatgtatattacaatttctttatacacttgttgattggtggctatttggtctgattccaaatttttacaattgtgaattgtgctgctataaacttgtgtgttcaagtatctttttcatataatgacttttttttcctctgggtagacacccagtagtgggactgctggatcaaatagtagttttacttttagttctttaaggaatctccacactgttttccatagtggttgtactagtttacattcccaccagcagtgtaaaattgttcccttttcaccacattctggccaacatctattatttttttattatgaccatttttgcaagaataagatggtatcacattattgttttaatttgcattttcctgataattagtgatgttgagcatttttttatatgtttcatatcttcttctgagaattgtctgtttatgtccttagctcactttttgatgggatttgtttttcttactgatttgtttgacttccttgtaggttctggatattagtcctttgtctgatgcagaatttgtgactattttctcccactctgtgggttgtctgtttactttgctaattcttttctatgcagaagctttttagtttaattaggtcccatttatttatttttgttgtagttgcactttcttttgggttctcagtcatgaattgtttgcctaagccaatgtctagaagagtttttctgctgttatattttagaattttcatggtttcaggttttagatttaagtctttgatccatcttgagttgatttttgtgtaaggtgagagatgaggatccagtttcattcttccacatgaggcttggcagttatcccagtaccatttcttgaataaggtgtcctttccacactttgtgtttgtatgctttgttgaagatcagttggctgtaagtatttgactatatttctggttctctgttctgtttcataggtctgtgtgcctatttttataccagtaccatgctggtttgataactacagccttttagtataatttaaagtcaggtaatgtgatgccttcagatttcttctttttgttttgtattgccttggggatgtgggctcttttttggttccatatgaactttaggattgtgtttttctagtcatgtgaagaatgataatgatattttgctgggaattgcattgaatctatagattgcttttgacagtatggtcagtttcacagtattgattcctgtcatccattaacatggaacatattccatttgtttgtgtcatttatgatttccttcagcagtgttttgtagttttccttgtagagatctttcacctccttggttaagtatattccgaagtgtattagtcagggttctctagagggacagaattaataggctagatgtgtatataaaggggagtttattaaggagtattaactcacacaatcacaaggcccaacaataggccatctgcaagctgaggagcaaggaatccaatctgagtcccaaagctgaagaacttggaatccgatgttcaaggggaggaagatccagcatgggagaaagatgtaggctgggaggctaagccagtctaatctctccacgttcttctgtctgcttttattctggctgcactggcagctgattagatcgcacccacccagactgagagtaagtgtgtctttcccagtccactgacacaaatgttagtctcctttgataacaccctcacagacacacccaggaacaatactttgcatccttcaatccaatcaagttgacactcagtattaaccatcacaagtcctccccttgtcaacttgaacccatacacacctcctgaaattatagataatcttcaaattaagacaataataaggtcataattattcccaacatgatacaactatccttcatacaaccaagaatgcaccaattcccaacccaaatgctattacataaagttaacatttaaattttcatatgaagtcaataaatcttatgtcacatgataaacaagaaaggaaataaaatgaagatattttcttagtacaaatgtataaatgcacaaacatgtttttaacaaagaaggaggaaatactcacgacaattaaaatcctcatttctgcaactggttgtgtggttcatagctggtattgatgactaccttcctctactactcattctgtattccctttgccttcagcaagcacctcagcaggtagtggttttttcctggtgtagtgacccaaaccttcattcctgaaggatctgggccatttgtagtcctgcctggattgtgctgttgtagtttcccattgacacagggcatggtaatactaagagacaccctaagggatcttgtgtattccatgcatactcttccttacctccactgtggagtagtagactgatttcatcttgagagtctgggtcagtcaccccagccaacactgtaacttccttcttagattgttggtttaaaggtaggaggagcccaaaaagtgtcccggtgtcaatcttaatttccagtttaatggaatcgtggttgtgtcttctggtggcagcattcctccctctggaactaagacctctaggccagcagaacataatgtcacagggacagtaagcaaaaattttactagtgggtcactaggggtgatggtaagtggtgccacttccacttccaccccttgattcctggacctgtgaattccggctatgggagaaacagtaccatatattggatgctgattcagagcatacacaaccttctggagaattttgccccagccctgcaaagtattgtcacctagttgacattgtaattgtgacttcaaaaggccattccatcattctatcaatccagctgcttcaggatgatggggaacatgtaaagaccagtgaattccatatgcatgagcccgctgctgcacttctttagtcgtaaagtgagtgccttggtcaaaggcaatgctgtgtggaataccacgatggtggataaggcattctgtgagtccacagatggtaatcttggcagaagcaatgtgtgcaggataggcaaacccatatccagagtaagtgtctattccagtgaggacaaatcgctgccctttctatgatggaagaggtccaatataatcaacttgccaccaggtagctggctgatcaccctgaggaatggtgccatatcaagggctcagtgttggtctctgctgctggcaaattgggcactcagcagtggctgtagccaggtcagccttggtgagtggaagtccctgttgctgagcccatgtgtaacctccatccctgccaccatggccactttgttcatgggcccattgggtgatgacaggggtggctggggaaagaggctaagtggtgtccacagaacgagtcatcctatccacttgtttattaaaatcctcctctgctgaggccagccgttggtgagcactcacatgggatacaaatatcttcacagtttttgaccactcagagaggtccattcacataccttttccccaaatttctttgtcaccaattttccaatcatgcttcttccaagtccttaaccatccagccaaaccactggctacagcccattaatcagtatataattgcacatccggccatttctccttcatgaaaagtgcacaaccaggtgcactgattgaagttctgtccactgggaagatttcccttcactgctgtccttcaggtatgtcctaggaaggggctgtagtgctgcagctgtccactttcaggtggtggacatatcatgcagaaccatctgtgaaccagtccttagtcttctcttcctcatcaactgatcatagggaactccccatgaggccattgttgcaagctggggaagagaaggaagggcggcaggagtggagaccatgggaatttgagccactacctcatgtaacttacttgtgccttcaggacctgctcgagcccgatcacatatataccacttccatttgatgatggaatgctgctgtgcgcaccccactttatggctagatggatcagaaagcacccagttcatgataggcagttcaggttgcttggtgacttgatgacccatagtcaaatgttcagtttccaccaaagcccagtaataggccaagagctgtctctcaaaaggagagtagttagctgcagaagatggaagggccttgctccaaaatccttgaggtctccactgtgattcacttatgggggcctgccaaaggctccaaatagcatccctatctgccactgacacctcaagcaccattggatctgctgggtcatatggctcgagaaacagagcaacttgcacacagcctggacgtgttgtagagtcttctcctgttctgtactacattaaaaagtgagagccttttgggttactcgataaatgggctggagtaacatacccaaatgaggaatgtgttgcctccaaaatccaatagtcccaaataagcctctttcgtggttgtaggaggggccaaatgcagcaacttatccttcaccttagaaggaatatcttgataggccccactccactggacccctagaaattttactgaggtagaaggttcctgaattttagtcatttattttccatactctggcatgcaaatgtctcaccaataagcccagtgtgtttgctacttctcactcactgggtccaatcagcaaaatgtcatcaaggtaatgaaccagtgtgatatcttatggaagggaaaatcaatcaagttctctccaaacaagattatgacacaaagccggagagttgatatacccctgaggtaggatggtaaagatatattgctggccttgctgactgaaggcaaattgcttctggtgggccttatggacaggaatggagaaaaaggcatttgccaaatcaatggttgcataccaggtaccaagagatgtgttaatttgttcaagcaatgaaaccacatctagtacagcagctgcaattgcagttaccatttggttaaacttatgataatccactgtcattctccaagatccatctgtcttcttcacaggctaaataggagagctgaacggggatgtggtgggaatcacaacccctgcacattttgagtccttgatggtggcactaatctctgcaacccatccagagatgtgatatgttttttgatttactatttttctaggtagaggcagctctaattggtcttcctattttgtcttttccatcataatagccctcactctaccagtcagggagccaatgtgggggttctgctagctgctaagtatacctatgccaattatgcattctggcactggggaaatgaccacaggatgagtccagggacccactggacccactctaagtcagacttcagctaaaactccataagcccctactttaactggaggaccaccaggacgttttcggtcccctggagtcaacgtcagcttagagacactgttcagtagtccctgaaatggcaatcatttccctttccccaatcacagttactctggtaaaaagccgtaggtctccatggggaaggatgggagaaagactaacagcataaattgttgtcagtgtcatccttgtatccctgggataaatcccacttggtcataataagtgatcttttaacagcgtaaattgttgtcaaggggaaccagcctccccttcatttaagggattctaggtctgtaaactggtttaagtctggaaattgattgaggggaaattgatcctctgtttttataattcaaattagtcttttgtccacttgacctggaagttttctgcttatataaattaaataagaatgcaataggcttcctatcattttcacttctaggaacaccatgattaatcaacagatgccagagatctacatgagtcagactattgtgattgctgctttgcctctgctgtccattatggtagctatgcccaccttgcctttgacagttgactggcccctgccacctcgagatccaattattcccattgcatttaagttttgtagttgagtgactgtggttcctactgtaaaatctggcatacagagaagagcaatcacaaagctcttcaaggatgcaggtactcccctcacaaatctattttgcaaagtattagtcaaggatatattttctggatcctcccagctgggatgagtaggtctaaactgactaatccactccaccatcccaatctccctaaaccttttgatcccttcctctacattaaaccaagggagatcaggcatttccagcttgctcacagtgggccatcttttaatccatatttcagctaaccaagcacataaattatcagaacctttttaaactccccaagctgcaacattaaatgcagaatccctgcttagtgggcccaaatcaataaattcagcctgatccaatgccttggatctatgttccatccaccattatcccacacccttaatatccattcctatgcctgtcctccagatttttgcttatataaataagaaagctcaagcagttcttttcgagtgtagcacacctcctcatgggttatactctgaacctcacccctagggccctcctgggactttagtctagttataggtctagaagcaaacaggggtggtggggggtgggtcctgaggagaatcaacattatcttgcctggcaactgcctcaggggaagccatcactgttgcctcaggcagtgcagggtttttctcctcagacaaatgtggaaaggctgatggcagtgtgggttggggaggacatgttgccactactggggatgagaaagctgtttcttctggcaaaaaaagtttcatcagaatttataatctcagtgtccccagcttcatcagggtccttttacatatccccattccaagtttcaggatcccattcttttccaatcaatgccctcatttcaacagtagacacctggcaaggctgtgcatgcacctttcattgcaggtcagccactggtatgataagaacttgtgtccaatttcccgcaatttcagctctttctctacaggagataagactctcactcagggcaatcttagcaggtttgaggttcagtatctgcttctgaagctaggaattagaatccctaagttcatcattttctttcatcactttgtccagtgaacttaggaggaaccaaccaacttcattatgttccttagttccccacatatggtcaaaggtattacatatagagttactaaactccttgcctctcacgaaccgtgcatcaggagtgtcaaatgaatttattttgtgtaactctgtaaacagttcgtgccaaggactatcagtgttctccatactattagaagtacagtccttagcatttttgggtctaatcatattaagcagccttctccagaaaccccaaaaccaatgaaagaactccatccttaatagtctgttcttctggaaccactcctgggaccaaaatctgtattagtcagagctctctagaggacagaactaataggatagatgtatatataaaggggaggttactaaggagtattaactcacatgatcacaaggtcccacaataggccatctgcaagctgaggagcaagcaagccaatccaagtcccaaagctgaagaacttggagtccaatgttcaagggcaggaagcattcagcacaggagaaagatgtaggctgggaggctaagtcagtctaatctctccatgttcttctgcctgtttttattctggctgtgctggcagctgattagattgtgcccacccagattgagggtagatctgcctttcccagtccactgactcaaatgttaatctcctttgatgacaccctcacagatatacccaggaacaatactttgcctcctgtaatccagtcaagttgaccctcagtattaaccagtacactaagtatttttttttttttttgcagctgttgtaaaagggattgagttcttaatttgattctcagcttggttattattggtgtatagcagtgttgctgatttgtgtgcattgattttgtatcctggaactttactgaattcatttatcagatctaggagctttttggatgaatctttagggttttcagagtacatgatcatattgtcagcaaacagcaacagttttaacttcctcttttccaatttggatgccctttatttcttcctcttgtctgattactctggatgagactttcagtactatgttgaatagaagtggtgaaaatgggcatccttgacttattccaggtctcagggggaatgctttcaacttttctccattcaatatgatgttggctgtgggtctgtcatagatggcttttattactttgaggtatgtcccttctatgccaattttcttgagggtttttatcataaagggattttgaattttattaaatgctttttcagcatcaattgaaatgatatatggtttttggtcttcattctgttgatatgatgtatcatattgattgatttgtgtatgttgaatcatccttgtatccctgggataaatcccacttggtcttttaactgtattgttgaattcagtttgctagtattttgttgaggatttttgcatcaatattcatcagatatattggcctggagttttattttattttgatgtgtcattgtttggtatcaggataatactggcctcatagaatcagtttggaagttaacccctcctctactttttggaatagtttgagtaggattggtattagttcttctttaaatgtttggtagaatttggcagtgaagccaatgggtcccaggctttactttgctgggagactttttgttacaactttgatctaattacttgttattggtctgtttaggttttaatttcttcatagatcaaccttggtaagttgtatgtgtctaggaatttatccatttcctctagatttttaaatttattggcatatagtggctcatcatagccactaatgatcctttgaattcctgcagtatcagttgtaatgcctcctttttcagctccgattttatttacttgggtcttctctctttttttcttcattagtctgtttaaaactttgtcaattttatttatcttttcaaaagattgactttttgttttgttgatctcttgtattttcatcatttcaaatatatttctgctttgatctttattattttctctactaattttggattcagtttgctgctgcttttctagttctttaagatgtatagttaggttatttaaaatgaggttttcattcttttccaatgtaggcaattacagctacaaatttccctctaatagtactccttttgttgtatctcataggttttggcatgttgtgtttccattatcatttgtttgaatcaaattttcaatttccttttaaatttctttattgacccactggtcattcaggagcatattgtttaatttccatgtgttcatgtagtttccaaaattccccttttttatttctaattttacttcattgtggtcagagaagaatcttgatatgatatcatttttaaaaaaatattttaggacttgtattgtgactagcatatggtctatctttgagaatgatccacgtgctgagaagaatgtgtattctgcagctgttggatgaaatgctccataactatctattaggtcaatttgttctatagtgcagattaagtctgatgtttctttgttgagtttttgtctgtcagttctgtccaatacggaaagtggggtgttgaattctccacctattattgtattgtgatctctatctctcttttagctctaatactatttgctttttatatctgggtgcttcaatggtgggtgcatatatatttataattgttatatcctcttgctgaattgaccccattatcattgtacaaagaccttctttgtctctttttggagtttttgtcttgagatctattttatctgttataagtgtagttacccctgctcctgttttgtttccattagcaaggaatatcttttcccatgtctttattttccagtctatgtgtatcttcataggtgaagtgtttcttgtgggcaacagatcattgggtcatgttttttcatccattcagccactttatttctttttattggagagtttagtccatttacattcaataatttcatttaagtaggaacttcctcctgccattttgtaatttgttttctcgtggtttcatggtcatctctcccttctttccatcttctttttcatgaaaataattttctctggtggtatgatttaatttcttgttttttattttttgtgtatccattgtatgtttttccatttgaggttacatgaggtttatgacttatcttatgacccattattttaaactgatggcaacttaacagactgcataaacaaaaaacaaacacacaaaaggaagactaataaaagttctacactttaactgtatcctcctgcttttaactttgtgttgtttctctgtgtcttattgtactatgttgtgaaaagttgtcttttttttttttttttttctgagtcagagtcttgctctgctaccaggctggagtgcagtggcctgatcttggctcactgcaacttctgcctcctgggttcaagcgattctcctgccttagcctactgagtagctgggactatgggcacgcaccaccacaacacccacctaatttttatatttttagtagagacggggtttcaccatgttggccaggatagtctcgatctcttgacctagtgatccgcccatcttggcctcccaaagtgctgggattacaggcatgagccaccatgcctggccaggttgttattatttttgaccagttcatcatttactctttctacttaagataagtttacataccacaattacagtgttataatattctgtgtttttctgtatgcctattcttaccagtaagtgtctcggcattgaagagctaggtatttcttatagtctttgcagtctgggcttgtttatccctgtccttcttgagaaggttttccagaaggtttttatttgaaggagcttgggcctcaatcccaataatactgtggtttttgcagactagtagaggtaccatcttggaggtcttgaataagatccagaatgattatctggattgccaggcaaaagcacttgttcttttcccttactttctgtcaaacagtctctttctgtctctctctctctctctctctctctctctcaaggtgctgggccatcttgaactaggggtatggtgatgcaagcactcctgtggcccccactttggattgtgctgggtcagacctatagccagcacagccctgggtcttgtccaaggcctgctgtaaccactacctgactaccacctatgttcactcaaggccctagggctctaagatcagcagggggtgacaccagccaagtttgcatccttccctttagggtagcaagttccccctggccctgggcaggcccagagatgctacttgggagtcagggattggagtcaaaatacttagaaatttgcctgatattttatttgactacggctaagctggcactcaaaccacaagacaaagtctttcccattcttccctcccctttccacaggcagaggtgcctctccctgtggccagtactaccactggtccacagggaatctgcctggccactgctgatgttcacttaaagcttaagggctgttcagttgtgttgtggtgaatgctgccaggcctgggactcttcaaggaagtgggcacccctctgccctggggaagatccaaatatgctttccaggagccaaagcctggacttggggaccccaagagcatgcttgttgctctactccacgtggccaaactggtaccaaaggtgcaagacaaagtcccctttactttttcctctgtttctgtcaaacagaaggagtctttcactgtagccaccacaactaggaatgtgctggatcacacctgaagtcagcacatctcagaacctaaggcccacagtatactacctggatatcactgctggttatttggtgcccaagggctctttagtcagcaggtgattaatcttgccaagactgggtccttcccaccaaggcaatgggttttctatttgtccagggtgtgtctagaaatgtcatccatgagctagggcctggaatgcgggcctcatgactctactcaatgccctatcctactgtggctgagctggtatccaagatgcaagacaaagtcctctttactcttttctctcctctccttaagcagaaggaaggagtgacttttgttgctgcaagcttcactgcctgggattaggggaggggtggcacaagcactcccttagctgccccagctgatgacttcctaggtcatgtgccacccctatccctctggttctgagcccagcccagcactaggagttacctaggaattgcaatccttgtgtcctagactgtctttcaagtttacctagaacctcagagcacttaagcatatagtggtgaggcttgctgagttctgactgctgggatgagtgattcgcctctggccaggcctgttccaaaatctcccttcatgtgcagctgctggctgagtccagcacagtgttgttccctgctacgacagcaccgagtttaatgtaaagttccccagttgctgtgctttacttcctccaagtgcgcagactccccacgttgctcagctgctgctgggggatatgggaggggtgatggtggtgatcccagagtgtctctccaaccctcttcaatgcctcttttagtgatacgttgttaaatctaggtactacgattgctcacctgatgtttggtttttgtaatgacgcttttccgtgtgcagatagttgttacaatttggtgttcatgtggcgggggaggggggggatggtgtaggcttctgttccactatcttgctccacctcaatagtctgatgtgcagaagctctttagtttaattaggccccatttgccaatttttgtttttgctgcaagagcgtttggcatctttgtcatgaaatctttgccagggcctatgcccagaatgatattttctaggttttattctacggtttgtatagttttaggttttacatttaactctttaatccatctcaggctgatttttgttcatgctgaaaggaaggggtccagttttcagtcttctgcatatggttagctagttatcccagcaatattgagtaggaagtcctttctccattgcttgtttttgttgaagatcagataattgtaggtgtgcagctttatttctgggttctctaacctgtcccattggtctatgtgtctgtttttgtattagtaccatgttgttttggttactgtagccttgcagtatagttgaagttgggtagtgtgatgtccttcttgttctttttgcttaggattgctttgactatttgggctcttttttttttccatatgaatgttaggatagtttgtttttctaattctatgaaaaataatattggtagtttgataggaacatcattgaatctgtgaattgctttggacagtatggttatcttaacaatgttgtttcttcctacccatgagcgtggaaggtctttccatttgttttatcatctctgatttctttcagtagtgttttataattctttttatagagatctttcacatccttgattagccatattcctaggtattttctttttgtgtatgtctattgtaaatggcattgtgttcttgatttggccctcagcttggatgttgttggtgtacagaaatgctgatttttgtacattgattttgtatgctgaaactttgctggaggttttatcagatgtaggagctttttggcagagaatatagggttttctaggtataaaattatattgtctgctaagagagataggttgacttcctctctgcctatttggatgccttttatttctttctcttgcctgatttctctggccaggacttccagtaggatgttgaataggagtggtgacagtgggcatccttgtcttattccaagtctcaaggggaatgctttggatggtaccaatccttttaaacttattgaggattgttttagataatgttccatgtgcaattgagaagaatgtatattatgctgctattggctatatgttctatagatgttgctatgatatgaatgtttgtgttccccaaattcataaattgaaacctaattctcatgttgatggtatgaagaggtgagacctttcaaacataattaagtcatgagggcagagccctcatgaatgggattggtgcccttataaaagaggcccagagaggtgccttgcctctttcaccatgtgaggacacagcaaaaatgtgacatccatgaaccaaaaagtggccccctccccagacactaaatctgctggtgcctgaatcatgaactttcaagcctctagaacagtgaaaaataaatctctcttgtttattaactacacagcatatggcattttgttataatatcctgaacagactaagacagatatcgtttaggttagttggtttttagtgttgttcacatctttcatttcctagtgatcttctgcctagttgttgtccattattggaagtggagtattaaagtctccagttatgactattgaattgtctatttctcccttcatttctgccagtttttgcttcatgtgttttggggctctattattagatgcaagtatgtttttagttgctatatcttcctgattggtccttttgtcattataaaatgtccttcttgatttctagtaacactttttgtcttgtctgttttgtctgatattagtgtagtcactccagctatcttgtggttgctgtttgtacaatatatgttttcccattcttttactttcaatctgtttgtatctttgaatctaaaagtgtctcctgcagacaacacatagttggatgttgttttcctaaaaactctagactgacaattctgccttttgattgggttctttaatgtattcacatgatgttactattgatatatttggatttatgtttgttattttactcctttttctatatgttttaattctctttttttcctatacttttcatttactgatttatattaagtgaatattttagaatgtaacatggtaatttttaaaataaattttaaactgtatcttttgagttattttcacagtagtttctctagagtttaccatatatattttagcttattggtatctgcttcagatttatattaacttaattctagtgagatataaatatgttacttctagatagctttatttctcttctgccttttgtattactgttacacatattacatcttgtggtggattgaattgtgggcctcaaaaatatatgtccacatagtaacctttggaacctgtgacctcatttggaaataagtctttgaagacataattatattagagatttggggatgaaattaccctaaattttcaggtgggggctaattccagtgaaaagtttgttttgttttttaaataagagatagaagatggaaaacagacacagaggaaaaggccatgcgaagatggagacagagattggagtgatgtcaacagccaccaacacctggaaaaggcagaaacagattctccgtagagcctctaaagggagtgcaaccttgccaacatcttgagttttaattctcctctccaaacctgggagaaaaactgtcttaagcaacccagtgtgtagtaatttgtcacagcagccacagaaaaccaatgcacatttatagtattatatacccaacaatacatcgctataataattattactttatgtaatcttatattttttagaggcactaagagaaaaaaggagaaaattatatatttatggcatttcttatttgtcattgctagttctattcatttattcttgtggattcatattaccatctggtgtctttttttaatcagatacagctgttctcccacacacctcttttatactgtaattgacaaatttgttatatttctgtatgtttttggtccaacaatagagttctacatactgttttatgcaattcgttagactcaggttttctatttcaccttcgaagtgtggcccttaggccaggagcagtggctcacgcctgtaatcccagcactttgggaggccgaggcggatggatcacaaggtcaagagattgagaccatccttgccaacatggtgaaaccccatctctactaaaaatacaaacattagcttggcatggtggtgtgcgcctgcagtcccagctactcaggaggctgaggcaggagaattgcttacacctgggaggtggaggttgcagggaaccaagatcacgccactgcactccagcctggcgacggagcaagaccaaatctaaaaaaaaaaaaaaaaacaaacaaactgtggcccttagaacttaaagtcatattttggttctcaaatcagttccaagagtaggtgatctagccctttcattctaaacactacacatgtagtactagagtataatattgtatttgcttattttttcagagtcagggtcttgctatgttttctagactggggtgcagtggggcaatcatagctcactctaaccttgaactcttgggctcaagagaatcctcctgcctcagtctcctaagtagctaggactacaggtgcacaccactacacccagctaatgcattttttttttaacacacataaagcacagttttttcacaatagattgacaacgataattcacgtcttttttgctagatgatattaagccacagatcaaaaagtcctagacttttatacttacttgaaaaaaacctcaaatttgctgaatgccattgtattaagagctaatctgtctggtccaatcacataatatatttgcctatattcaagtttcatatttctacatatttgataaacattcacactagattttcctctgtgctgcagacaaaaattttcttcaatggtgtctgaaaagggaggcctgcaaccactaccaaaccactctacctgagattagtttattagatagtgcctaacctgaaataaaaatctgctgatagaacattctgcaaaaaaagctctattatgttatagtagagctcatactatattatggtttcaaaggtaataagaaaaatatcatcagatcatcattatggtagctattttaagggaacttaataaaaatttaacagttatcatcaaacactggccacctcaattttaaacagtaaacacacgaattactcccataaaaattataagcataacaggacacttcttggctactattcaatactgacttggatgttctagataacacaagataagatacatgtgtgaatatctatacacatatagacatatttatagatgtgtgtgtatatatacagtatatatataagattttagaaaggaggataaatatatattacatgataaaacttatagtcaatataattttacacttgtaaaatcccagaaaaccaaaggaaaaaatagaactaaaaaagagttcaatgaaatgattagtttaaaaaaataaatataaaaaatgtaattttcccacataccttcaaaatgtagcaatcccactaagcaaaaagtggtatttctaccaactatagataaatgaaaattcacctttaaatgtctcttatcctccatgaaactcatcaaaaacaacaaaaagtacagcagacaaaaaaaaagtcttatctttaatgaaactttgtaaaacatttgaacctcaaccatgatgtgtatgaagataagttactaagtgccatgaagattggaccaagatatgaaaatgctaggagaggatacctttcactgaagatcttggaaagggttggtatattggtattttctagagtagtgattctcactgagatgcaaaaccaaagactccttgttttggattaaaaagatctaggtacagaggctgagggcagaactctctcattatcctatttgtcaacacaaaataggagagaaggcaggactaaatctgagagtgagcagatgcaccattatttcaagattgaacctaaggatgtggcaaggtaaggagaaaagtcaggatgacaagttgccctgtagccgccagttctcatcagttgaagatatattaaaactatggtacacataagccactccatcaaacagtaaatatggctatactgcaagcagtaaaaaagtgaacaggctctgcttccatacagtcaagaacaaaaagaaacacttgacaaggttgagaaaaataaatggaaaaaaataaagaatttaaaagaactggagagaaaactgtagctttggaatacagaaaaaggagatacagcatactgctaatagatgtcctcaaagagaccaaatacatagacaaggggaaaaaatccaaagacatcattcaagaaaaaattttgagatacaaataaacttcagacttttacttccagcaatggaaatccagtttgtcttcagccagtggcatatctcagacaataggcaagccatgagaatggttgttggactgcagtttcggactctattactacatgtatagtatttagaataaaagagctaggtctcctcatgtcagcacttatttgaccaatgggagtatgattttaagtttttagggtcacactttgaaggtggaatataaaaaaaattatagaaagataaatttttgttcagatgcatctactgcagcaatttgggaggctaaggtgaaaggatcgtttgagcccagaagtttgagaccagctgggcaacatagtgagaccttgtctctacaaaaaattaaaaattagctgggcgtgggggcgcttggcctagaagttcaaggacagtttgggcaacatagtgggaccctatctttataaaatatttttaaaaattagttgggcatggtggtgtgtgcctataatcctggctacttgggaggctggggtgggaggatcacctgagcccagagaggtaggggctgcagtgagccatcttcacaccactgcactccagcctggatgatgaagtgagattctgtcccaaaaaaaggacaaaatgaaatatcagcaatgaaaggtcctgctaaagagaaggtttgttaattcataattttaatgtttatctggtcatcttatccaaaaggcaaaaatctttagcctcccttatctttgggatatcgttctctcttaaatgttgctttctcacaaatcccaatttacttgaataagaatgcaatgttatgccaaaagttagggaggcatatggtgggacaaatcctactgggtggatggtttcttcattcttttcacaaatgaaatcttctgaaaatagacgtcagtggcagtttaaatagagaaatgggaaaaagggaagccaaaaatctgagaagcgtgtgaaagaggaggagtttctgtgaagatttcccatactgttctctgtatgcatttttccttttttcctcacgccctaatctatacccacacatactatccctctaggtgcagctcagaattcctaaacctggtataattggaggcatggctgcagacctaaaagttcggtacatctttacagttgtatttcatctgtttaaggcagaaagaataaattttcattccaaagcagttagcttgcttagcagcattaatttaaaatgaagaaatgcacatcctaatctctggcactgaagcagaaaattagttttggtttagaaatttggtgaagaataagttcaatttttatgggctgttttgcatcctggtgagatctaatgaggtctgtacttgtgactacctaataggctgacatgtttcctcctttaattttatctgagacttggtgtcaatgattttttggtttcttaattcaaaaaggcaaactagccaaggggtatttactacttatattgccttatatcacagtgtgccctttctagttccctagaagagataacgaatgggtttgtgtgtttagggaggtaactggtttttagtggaacactggcattatcaatcccactcttagtgttaaaaagagaatgcccgagctacccctctccccaccattttaatcagcaatttttaaatgttttcaaatattatagaaatatgcaggctgatgccaggtgcggtggcatggggctcacacctgtaatcccagcactttgggaggccgaggcaggccaatcacttgaggtcaggagttcgagaccagcttgtgcaacatggcgaaacctcacctctaataaaaatacaaaaattaaccgagcatggtggtgcgcgcttgtagtcctagctacttaggaggctgaggcaagagaatcgcttgaacctgggagggggaggttgcagggagctcagatcgtgccactgcactccagcctgggtgacagagcaagaacctgtctcaaaaaaaaaaataaaataaaataaaataaaataaaataaaataaaaagttaaaaaaaaaatgcaaggtgagtgcagtggctcatgtctgtaatcctagcactttaggaggctgagataagatgggaggatcgcttgagcccagaagtttgagaccagactgggcaacaaagcaacacgctcatctggaaaggaaggaaggaaggaaggaaggagggaaggaaggaaggaaaaaaaatttcaaacatacacaaaagttgagagaattgtgtaattgaccccaatgtaccatcacccagcttcaataattatcgatacttttaggcaggtttctaccagaaaatatgtcctggaaactttaattcttgatctgtgttcagattttgcctttcaaatgtttcattattggggctttggacatattgcacctgtattaaaagaaggatttgagtgaggaatttagtgcttcatagtcaatagtcaatgagtctccttttggctcgcctccttcttagggaaaggaactggttgtagggtgttaggcagaatttgggtgtatctgttgtggctcagagatgtttctcatagaactgatcactgtcccaatatccacgcaaaagaccaaattaaaagcgaggagaaatacctaatgtaaatgacaagttaatgggtgcagcacaccaacatggcgcatgtatacatatgtaacaaacctgcacgttgtgcacatgtaccctagaacttaaagtataataataataataataataataataataataataaagcgagggtgggtatctagcctattcttatcctgcctcatggtgttttctaaatatttacagaaagaaaatttacagagtagtttcctggtcaaactctaatgagtatctcagtactttcccctccacttctcacgtcttctttggggacgggtcgtcaagtctttgagtttctagttattgctattgactggtttataacctcctctttcacccagatcgtcaagggccgtttgcaaagcactcccaagtagagcctcttggagaaggagaaactgctatcacgcaaaaaaaaagccttgagctcgctggctccgctgcctcgaaaagccagagtccggaggcagtttgatgcggacactattccccaaccttcttcccctccttgtcgtctctattgccctcttggcagctcctgggatacaagagggtgcaggacagacttcaacccgcagcaggatccagcgcggaaagctctgcagcaggatccagcgcggaaagccccccgcagcacttctttcggggggctcctgtttccttaagcctagaaggtgtggtcgctcacgttcaccgtcccgcctctcgccgcctccgctcggcagctccacgctgagtcccgccctctccgccggagaggtgcgccggggtcagagcgccgggacccgacgcgcggctcccaaagggcggcaggaagagcccagctgggctcagccacagttatcagcaatctgcgggcagaggatgtggaggttaagatctgggcagcctcagggcgttgtcctagaaaacaccgtttaaggagagaagtgttagtgtctcggggcgtctcccaggctccgccctgcgcccgcagccagcgtggtggtcgagaccccagcccgctgctactggagacagcacctctcgcgcccgggcgggcggcctcgtctctgcacccctaggcggcgctgcgctcctcaacacccggccggctccgctttcccagacggctgcccagcctccagcctagcaagcccggctcccagctggccagccccggcaatgccggcgttcgggaggcgcaacgtcggcggtcgctgagtatccagcccgcagcagtgacggccggcaggagcgtgctcttccccgcggctcgtgctctccaggagtccggagcatggtcctgggtcaccgttggtgtagcgtgttggtggaacgtggacgcctagagggaggatggtgggctgtggggtggcagttttatgtttgtgggtttcctgcggcgctgcagcgggacagctcgagtactcagtgccggaggagacggagcggggcgtagccgtaggcaatctctccgcggacttgaggctgccagcggccgctatgtcctcgcggaactttcgcttcctttccagccaccgcgagctctacttcggggtggatctacccagcggcaatttggtggtcagagagccggcggaccgcgaacagctgtgcagggccaaagctgcctgcgtcttgacctacgacctggtgctcgaggacccgctggagctgcacaagattcggattcacgtcctggacaccaatgacaactcacctctctttcctgccggcgacgtgcagctgcacatccccgagttcctgacgcccggagcccgctttactctcccgaatgcccaagatgacgacgagggaagcaatgggatactaagctacagcctaagccccagtcagcactttcgcctggacatgggatcgcgggttgacggcagcgaatacccggagttggtgttggagaaagcactggatcgcgaacagcgcgccacccacctgctggtgcttacagctcgggacggcgggctacctgcccgctcaggagacgcacaagtcaccatcattgtggtggacacaaatgacaacgcgcctgtatttgagcgctccgtataccgcaccaaggttccagagactgcacccaatgggactgtgttattccgagttcaagccttggatccagatgaagggtccaatggggaagtccagtactccctaagcaacagcacgcaagcagagctgcgacaccgctttcacgtgcaccctaaaagtggggaggtgcaagtagctgcttcactaggtccgcctgaaacgctcttggaggcatacattgaggcgagggacgaaggtgtctttggtttagctagcaccgctaaactgctggtggaggtgactgacgtgaacgatcatgcccccgaactggacttcctgactctttcgaacccagtacctgaggacgctgcccctggcacagtgattgctctctttagtgtaaaggatgaagacctcgattctaatggtagggtcatttgtggcatgtctagtgcaggcccttttcagctgacggcttcctttgacaactactacagcctgctgattgatgggcccctggaccgggagcagatcagtgaataccaagtcctgatcacggcctcagatagtggctcacccccacttagcacccgaaggacaatcactgtgtcagttgctgatgtgaatgacaatacaccaaactttcctcaaccccagcaggaacttttcgttgctgaaaacaatggccctggggcctctctaggccgagtgtttgcccaggaccccgacctggggaagaatggccttgtctcttatgagctgttggatgttatctctgaagggccatcagcctctagcttgctggcagtggaatcatccagtggggccatcactgccaaaacttcctttgactttgagcagctcagggggtttcatttccaagtagaaggccgggatggtggcattcctcccagaagtgcaacagtgactataaacttgtttgtggtagataggaatgacaattatccggttatcttgtttcccttgcccagaaatggttctgtcccagtggaaattgtgccccgctctgccaggactggacacttggtcacaaaagtggtagcagaggatgctgacagtggttctaatgcctggctttcctaccacatctcccgggcgtctgactctagtctctttagaatttcagccaatataggtgagctccgtactgctcgcttagttcttcccactgatgcagttaagcagagggtggtggtagtggttcgggaccatggagacccaccactttcctcctctgtcactctgggtgtgctgttgagcaactctgtccctcagttacttccagactttgaagatgtctgggaaccaggagggcagctttctgcccagaacttgtatttagtaattgccttggcttgtatttcctttttatttctggggtgcttacttttcttcgtgtgtaccaagttgcaccagagcccaggctgttgcgctcagagctgctgtcgctctacagaggatctgaggtatggaagtaagatggtttcaaatccttgcatgacatcagccaccatagatgtcactacagttgagagactttctcagacttatctctatcgggcctctctgggacttggttctgataataacagtttgctgttgcgtggggagtacaatgctgccgacctgcgaaatcttgccactggggtaggactgaatttgccaatatcctgtattcagattcggaataggaaaggggatcacgctaatgtcaatgccatggtaagcaaattttatggaatttgattcctttggcccggagatggctgctagctgtgttttgaaatatttcttagacaagcctttcacaacatttcatcaattgaactaaacactccttcttagcacttcctgtgccaagaaatctggaagtatagaagtattagaagattgccctaggcctcaagggacttatagtttatttttgagaaacaagggcaaaaattaaaacctatttaagaacaataaaagtaatatgacataaaggtctaaaattaaaaataaaataccaaaatattttataagcaacagatgtgtaaggcactctaatatttaaagtgaagaatgaaaaatatgtaagagtctgctttatatgaatataatatggaaggtgaaacatttacttaaactattgcaatgcattattaaaagatgacgataaccacaaaagatgtaaaaataaattacaatgggggttaaaagaagggagaaagggaacataagagaacatttgagtgaggaggaaggagtcagagaaggctttgtgatagagatcacagatttagttggatctttaatacgatataccatttaataaaaaacagtgtattctctagcctatacttttaatgaataccattttggtgaaggtgtcttctttgggaatgacaccctaaaacatagctgatagctccatagcagtgttttgtaactgctttggagtttttgcttacacaaaaactgtaagcctctctcataacatctatttatactgataggagatcatattgttggatataggacttgacaaccttttgttttgtgtttctattgataatattttacaaagaggaaagatgagtaatttttatgtcagaaatatttatgtgttcaaaggtgcacttaccatccaaagtccattcaacttggatttaatttcttttattttaggggacaaatacacttaacaaataagtaaatatcatatttgagagtaatgtatctaatgaaagttaagtgattcaaatatttcaatttatctgttagtggcccttggcatttcaaaacttcttttttttttttgagacaggggtctcactatgttgcccaggctggtctcaaactcctagcctcaagtgatcctcccacctaggcctcccaaagtgctgggattacaggcatgagccactgcagctggccctcaaacttcttgagtgcagttaggacaacattttgaagcaattctacggtattactttttgacttctcatagaaatcctagatgcaagagaaggaggtgtgtagaaattaaggaaggaaaatgaagcattccttgttttactattctaggcaataaggggaaaagtggcttgtaagttattcttcctcaagtaatgatgttaactgcaaataaaataaatttacatatgttaaaattttctgtacttaatattttcacaatataatagaatccagcatataagatatgcttagtaaatgctgactgaatgaataaatatgtgcatatatgaattggatggtaacactgttcaacacagagggaaaaactttaacttacttttctactttagatgtgtatatgtggttaacagtttaaaggtcactttcaaatgtactgtttcaatgattattttcttcctcatgacctacactaataacataacagaggaattttctgattgtagagctagcaagaaaaacttcaatgctgtgtctgggactaagtatgagtccagttctacagatgacaaaggaattaataggtatgcacatcattacattgtgatatttgcagtggatactatttaatagaatctcagttaattttagggaaggaaattggtgcactacaatgctagtatttcaggtatcagagcacttaatatgtgaacacttttcctaccaagaaatttcactatttatttcttttattttcattgctttctgtaacaaaaagagaggagaataccagtaatggctgtaaagtttgggagtgaggaattttttttagaaacacattttcactagactagaaaggaaacataagtaagcgataggaaggctgatgaatctagaagttagaaggaaaattagctatttaaaaggaaaaatataggaatgacagaggaaaaaacaacccttcaaaccaaatttttaaacatatatgaatgattaacaaaataatagagatatactgttcatatgtgcaggaatattgtaccatcccattcattcagttgaacagtctttttccatcattgttgatattttgctttttaggtagctcattggtctgctaataattgttgtgggctggatatttccttataaataaatgaattgtgattcataaaaccatgaataaaataacttctataaatatggggtatttgtaattcacaaaggcatttgttatttacttcttcctgttcaattacctattgatctgatcttaattctttagaaaagaattcttgtcatagtatcctgaatgccttaataacaacaggattctagaaataaaatatttattgctttcattttatttcaaatcatttgaaaagcatgacatttaacaatgattataatgtgtgtctgagtcttacagaatcatgttgatgcatatgtgtttatattttgctcaaattctaagttctttcattttagtttacggtaagtttacagtatatattaacatagcctgtaatactaaaaattatcagtttaagaaattcaggaaaacatggtttttatctctgtatttccaattgataatatttaagatataaacaaaattgattcactgattgtataacaattagacaatgtgtacctcatgtccatttttttctgttaatattcttgatgggcaatttaaattttttagaatggtatctaagagggtacctctgagatataaatttctacttattaaaaactgcattgacaatttttaaaggtataaatatattaatgtagcaaaaatgcatgaaacacttaccatacaactggccttattaaatttccacatgaaagttatacatagtttcaacataccaatgttatattagtgtattgttcacctggaattaaagcatcttcttttttgccagggtatataggaaataggatatctcctctttgcaatgtcatttgttaacagtagtagaatgtttgtggcattcaaggtgctttatttaacatacattccacaagtagactttcccatagggtaattagatgttttgtatatctattttgactttgaagctgataaccacactaaaaaactttagaatgatgaaactaaggaagtttgcatgacatatgaaatatattcaaattaaaaaactcatatagacaacacaataatattgtataatatagaccctcaaatcagtaaaaaggaaagaaaaagaacattataatttgagtggacataagagaaaagcaataccttggaaacatataagtgggaaagtattgacaatgtgtctcataatgttaatgacttattgtcttttgttgtcttcaatattttcagttagagggaaacaataatatttcaacaactaaattaacttagctaggttggaatgaaggtggactaaattgctgaaaggtttttacaatgctcaaatgcatgtcatatgaatatcggaaatattaacacttggcagaacttcaagtgaatatggattacagtccaggatcctgactaaagtattatgggaagtaaggaatttgttggtaaaggttgttcttaagaaacaaagctaaataataaaggtagatagccactcattttgttcccaattttaattgatggcataagataatggttcaggatataaataaattacatgtctgttatattgcatttatgaaaaagaaaggactataaacacaaaaggttattatatattcatttggaacttgttttggaatctggaaataaatatgcaatctcgtattctcctgtgctgtagagaaagataaacactttatttctaacccatcccaaattccttggctgttcctagagccatctggttaccatctacagatattctgtgttcataggggcactctaatgacataccttcaaaatatactctgaattcaaacacattatggttattctttagaattgttaagcaaagactacagctgttttgtttaaactcaaaataatgttaatataaaataaaaaccaattaagaagtcttaatagtgggtttttaggttgatttgtctttttcttttcttattaggttaggctggccctgttaaacaagttggaaatcctgtctctctctctgtctctctcacattttttttcctattcctcggacacatttactgagattggtgatacagctttcttaaatatttggtagaattcactagtgaagctctctgtacctacagttttctttgtaggaaaattttaattgagatcaaatttctttgtatttttattgctcctatttcattcctgtacctttaattttttcagatatatgttagttttatctgtacttttgaatattttggcataaagttgtttataatgtcctgttgtgactttttttcacatctgcaggatctgtagtgatgtttcccttttcaatcctggtgttagtgtcacctctcatttttcttgactagacttggaagtagtttattaatgatattagtctttccaaggctaacttttggtgttttgggttcgctttgttgtatgtttgctttctattttattaattttcatactttattaatttatttccttccttatatgtttatatttcagtgtgcaacagaagtactctaaacatacttttcatttctatttcctcacacaaaatgtttaaaagatttgtacttaattgtggagatttatcaaaattaataataatcagtgcttcatcaagggcattcttactggtatttttcttactgcaaatgtccaatcatgaatgtaataaccaccagtacagtgtggagccactgctttgactccttctgtggttctatggtggccagctttacccaccaatgcttttgcattatcaatgcaagtgtaaatatagtgaaaaatgcaaataatgttttaacattattttgaaaattatattcacctcataaacacccaaagggtccatagaccacacttcgagagctaccgttctaattctatcatttcttcttttttttaattaattgtaacatttctgtaatgggtcttcaactatttgattagcctgaggtacagttcacacaggaaaggcaggataaatgtttgattcttcccctttgtttagcagtattcaaaacaatgaattgattcctggccatcttacaaaaaggaccaaggccttttttaggtgtcattatgaactcattgacttaaacatatttgatatggcccaatccatgtcaattatctttttaatgatcaaattatgctaactttggcaagttgggaactgttcagctttgctcctgagtctttgtgagtgtgtttgtgtatcttgttttaaaccttttattttggaataattatggattcacataaagttacaaaactagtatagagagatcccatgtgcttgtcacccacttttccccagtgataacaccctgaatccttttcatgtgagtcttaatagtcttttgaatgcttccttgatttctggtattacaagatgttcagattatcttgtacatttcctttcccagaatcagccatttttcaaagagctttcacttatttttagtgaaagatgatacttagagatataatctcaacaacaggtgtgcttattgctgctgggtcagttgctgtttctaggtatcttcagctactgagctaagggatgtctattttttaaaagataaaatacatcacatgtttatactaatctaataaagttcagcactccgaggtttttacttaacttcatcaatcttacattcctatttctcccatacgtcaaatcccagttttcattaacgtcaacagaattactcatttgttatcccacgggactcaaacaatggacttagaaaacaatttcagcactacagaaataatatgatactgtagcagtttaagtttttgtcattcttttcatttataaggcacatccttacaaatgcccagtaggcatgtacagtcaaattattgtgttttaaagtatcttggaaaagttcctctctgtgtagttaagccaccagctagatacagagctaggcttttttcaagtcgctttcaaatttagggcttgctttttaaattttaattttcttttataattatgtgaaatatttacatggctccaaaataaacttataaaacaaaatatatttagagaagtctagtatctattattccatacaatacacattcttccccactttgagttttttcacttaaaaatataaacgagattatttcatagtagtatagtatttacacatattccatactgcttaatggtgtcttttgattagcaattaatgagctccaatttatcaatattatcttttttttttttttttgagacagattctcattctgttgcccaggctggagtaaagtggtacaatcttggctcactgcaatctctgcctcccgggttcaagcgattctcccacctcagcctcccgagtagcggggattacaggcacccaccaccacacccggctaatttttatacttttagtagagacagggtttcaccatgttggccaggctggtctcgaactcctgaccttaagtgatctgcccgccttggcctcctaaagtgctgggattagaggcctaaaccaccacgcccagccaaagttgtcttttttatttagtattctttctatccttttaaagaaaacatatcctgcttcaagtcatgaagatatattcctgtgttttcttctataacattgctatccaatagaactttctgacatgctataaattttctctatctgcatatatggaatgtgtagctactgagcacttgaaatgtggctagtgaaactgggctactcaatttttaatgttactaattttaattaatttaagcttaaataaccacatctgtttagtggttgctgtagttctggaagctttcttgttttaacttgcacatttagatcttaaattacctgaaattgcttttgaatatagtgcaatgtagaagtcaagatttatattttccacttgtaaatccagttagattgcctactttcctcgctgctactgtgcagtgctacctttgtcataagcaacgtgactttatatattctgtttctggactgtctattctgtttcattggtcaacttgtctattcttgtgccaatacattctgtgttaaatatagtaacttttcatttgtattgatatctaattgtgtaagttctctcactttgttattctgcttcaagattaacttagctatttttggccctttgcatttctatataaattgtagattcagcttctcagtttctattttaaaaaaccctgctttgattttaattggcactatattgaatctgtagaaaatatggggtatattgaaaatatcttattttgatctttattgaatctataaaaatatgaagcttgttaacattgacaatattgagacagacaaccgattaacaaggtatattcttccatttatcttttttttttttttttgagacggagtctcgctctgtcgcccaggctggagtgcagtggcgcagtctcggctcactgcaagctccgcctcccgggttcatgccattctcctgcctcagcctcccgagtagctgggactacaggcgcccgccaccatgcccggctaattttttgtattttttgtagagacggggtttcaccgtgttagccaggatggtctcgatctcctgacctcgtgattcacccgcttcggcctcccaaagtgctgggattacaggcgtgagccaccgcgcccggcttcttccatttattttattattttatcttaatgtttatgtgtgtgtatgtgtatataggggtattgcacaacttttattagatagctgatattttaatgctattttaaaagtttaattttataatacaaaaattagctggacatgttggcacatacccgtaatcccagctactcaggaggctgaggcaggagaattgcttgaacctgcgaggcagaggttgcagtgagctgggatcgcgtcactgcactctagcctgggcaacagagtgatactccatctaaaaagaaaaagaaaggcagggcatggtggctcacgcctgtaatcccagcactttgggaggctgaggcaggcggatcacgaggtcaggagatcaagaccatcctggctaacacggtgaaaccccgtctctactaaaaatacaaaaaattagtcgggcgtggtggcgggcgtatgtagtcccagctactcgggaagctgaggcaggagaatggcatgaacctggaaggcggaacttggagtgagccgagatcgcgccactgcactccagcctgggcgacagagtgagactccgtctcaaaaaaaaaaaaaaaagtttaatttgataattggcttttgttgaaagtatatagaaataatactgattttatgttaactttgtatccaatgttcttgctaaatagtaaaatctcatatttttatattttgggttttctacatatactgtcatgctattcccaaataatgttagttttattattgtattttttactttctctctttttttaaaaaaatagagatagagtctcactacattgcccaggctagtctggagctcctgggctcaagcaatcctcccacgccagcctcccaaagtgctgggattacaggcataggccaccatgcctggtcttttaaaaactttctaatcacatagttttcttgctttctgtcattgcctatgaaattcagtataaaattgaatagaagtaatgttaatggataatcttgtcttattcctggtctcagagaggaagtttttaaatatttaatatgaaatacattgtttgattgggtttatttgcaaaaatcctttatcagatttattaagttccctttgttttttaatttattatgttttttaaaaatcatgaataggcattgaatttatcacatattttctgttattgaatggataatatggatttttatccttttattaatagcatgcattatattggttgatttgttaatgataaaccaatcttgcattcttggaataaactcaggttgcttatgatgtataatccttctttatatcattagacttagtttcctaacattttctttacagtttttaaatatatgtttatgatagaaacgcgtttctacagaaaaaaataattatttttaaaggcatagttattgggtactagacttagtacctgaatgatgaaataatcggtaccacaaacccctgtgacatgagtttgcgttataacaaacctgcccatgtacccctgaacttaaaagttaagaagcaacacacacacacacagatgcgcacacacacacacgcacaagaaattggcttttaactttccattcttataatgctctagtcggagtttggcatcaaggctatcctggctttatatagtaagttaagaagtgttacttttcttttacttattcggaagagttgtcttagtccatttgggctgctatatcaaaatagcataaactgggtggcttaaaaacaatagaaatttatttttcacaattctggaagctggaaagttgatgatcaaggtcctggcagatttgtgtctggtaatggcccactccctggttcataaaacagaatgtcaccttcttgctgtctcttcaccttctggaaggagcaaggtagctctctggaacctcttttatgagagctgtgccctcgtgatctaatcatctctacaaaagccctacctcctaatatcataatcttaggggttagcatttcaacttatgattgcaaaggaggagggaacacaaacattcagatcatagcaagtttgtgtaaatcagcatttttttcttccataagcatttgaagaattaagagtgaaatttataggcctagaattctcttcatgagaatgttaattataaattcaatgtctataacattaatagttatagaattatacagagcctctatttcttgttgtattagtttggttaatcaaaatggaaaattttaacataccttgctcaaaaacagaacaaggagacaaaagaaaatcaataagggtactgaaaacttcaataacaggaataaccaacttgtatgtatgtgtgtgttgctggacattatcatttgtgagatacatttatattgttgtgtgtagctgtgtatcattcattgtcattatatagtatttcagggtgtgaatggtcaatttctataaatgttctgcatgttcaagaaaaagcagtattctgacattgcttgttgttgtgttctgtatatgtccattaggtcatctttgctagttgtgttgttcaaatattctgcattcttttttattctttttgtttgcttattttatcagttactgagaaaattatgttaaagtgttccacgatgaatagtgaattgtttctccttggattttgtcaattttttgtgtcatatgttttaaggctattttattttattagattcttaaccaaatataaatatgtgatatctttctgctaaattgaaacttttagcgttatgtattatttacctctatttctgctagtgataaactattatagtttttgtttgcctgaaatgtcattcttgatagatatttttacatgggtgtaaaattcaagattggcatttatttcattttggtacattaaagttacctcctcaatatcttctgggttccactgttgtctcattgtgctgcttcatcagtaatttattatctttcttccaattttactaattttgtcttcttgtgtgtccaacatgctattaaaagtattccttgagttgttaattttggttattgtgtttttcattttaaaaattataattattactgatcaagtctgccatgatattttttataggtttctgttccctgcaattttttttttcaagacaagtcttgctccgtcgctcaggcgtgatcatagctcactgcaatcttgaattcctgggctcaagtgattctcctaccttggctcccaaagtgttgggatttcaggcatgagccgctgctcctggctcctgcaaatattcttaagcttgtcatttatttatttaaatatattaaatcttcatctgataattccagagtctgaagtctgcaagtgtatacctgctgtgtgctgtttcagctggacagctccatatttttatgtgtgccaacttttatttgacttttgatggtccatatcctgaaaatgatatttgccaggatatcctgagatcttggatggaaatacctttcttcacgatagatttttatacaccttccagtgagtgaatactactgctagtaaaccactttaaatcaagttcaagacttgaagctccttggctacttagactacgtattctcagataaaaatatgcaggatatctggtatctagttacaagtttataggattaaattttcctttcctattttccttctggcctttttggtgccaagtcaaattccccagcagttttctgggctggagagtaggtgggtttagttttcacatactattactggaaagattagtcctttgaagttccagcttaatgtagtttggaggccccataagactccccatcttgaacatcctgcttctttttttttctttcttcctttctttcttcctttctttctttctttctttctttctttctttctttctttctctttctttctttctttccttccttcctttctctttctttctttctttctttttcttctttctctttttttttttttttcagatggagtcttgctctgttgcctaggctggagtgtagtgacaggattttggctcactgcaacctccgcctcccgggttcaagcaattctctgcctcagcctcgggagtagctgggattacaggcgcccaccaccacgcctggctaattttttgtatttttagtagagacgaggtttcaccatcttgaccaggctggtcttgaactcctgacctcgtgatccattcgcctcagcctcccaaagtgctgggattacagccatgagccatggtgcccagcccatcctgcttcttaatttctgtcttcctacaacttatgtccaattttatgtcaagttcaatattctgtttacctctttgggcttagctttcctccacaatttgtcctagcagttccccattatcttatcagattttcagtgcttttaagataattgttttaatgttttacccaagaatatttagttgatttcagtaggatgactgctgtaaataatttaggctgccattacctgatattccctatcatagagttctatcaccagtgactagcatctaagtaacattgaaatgcttttatgtatatcttaaaatatttgaattacttttgttttgaaaacaatagtatctttactttccctaaaccttgataagggattcatatctcttattattaattttgggaaaaaataattcataaacctggtctattatgaaatgtttgctaattgagccaagagagcacatgcattcatctaaaacattcatataatcaaactttattaaaggtgatatttgtggctttacttgacataaaacagcttccatatttctctattccagacattttatttaaaatacatttttgagcataagatatttaaaatgtgtaggcaaataagatatccatatcattaaaagatatctaaagctggtaatggtggctcatgcctgtaatcctagctacttgggaggtcgaggcacaagaatcacttgaaccagagggaggcggaggttgcagttaacggagattgcaccactgcattccagcctgggcgacagatgagactctgtttaaaaaaaaaaaagatatctaacaataaacaagtaaactatcaattataatacaatcaaattcaagctacaactgaaataaatacatggtatctaggaaactcagaggggaagcaactaactcagtatggtggggggtagggggttgaggcagaaaaatcttcccatataggatgtcacatataattatagtgtttatatttgccaattgtaaaaaaaaaaatggcaaaagagatctcattcagaaaagcaataagcacaaaagttttaggaataactttaatgagaaatatgaagtaaaagtatgaaattttgttgaaaaatattttaaaatcttgtataaatgagatggcataatgtatttttaggcagaatattacaaaggcatgttttccacaaactagttggatttggccctgtgtcaataaaaattccagtaagatgattattttgctttagcatgacaacttttttcctaaaatttatctctaagaataagcgtgaagaaaaaaaaaattgaaaaagagtttaaagtgtagacgttctgttatcagaattaaattttggggctgggtgtggtggctcatgcctgtaatcccagcactttgggaggctgaggtgggtggatcatttgaggtcaggagttcaagaacagcctgaccaacatggtgaaatcctgcctctactaaaaaatacaaaaattagccaggtgtggtagtgggtgcctgtagtcccagctactctggaggctgaggcaggaaaatcgcttgaaccctggaggtggaggctgcagtaagccaagatcatgccactgcactccagcctgggtcacagagtgagactctgtctcaaaaaaaaaaaaaaaaaaaagaaagaaagaattaaattttgggaagtcattattagcaatattgtgtagtatccattggacaggatgagagtagaggaaaggagatcattaaaatatacaggtaagaaattatggatatttaaattcagactagaggcaagggctttaatatgatataaaggatagaattgataaggctaaatgtgggagatacagtaaaataataaatagatgctatcaaggttcatggaaatgttgagttcagtatgcaaaatgtcatgtaaatagacgtagacaataatcattttaatttgttgatctgagtggggctgaattctaaatatagactttgattcatctgcataaggaagctggattatggataaaaccatctatgaacaatgtataaagtgtgaaaaaaagggataaggtcaaaatattgtggaacacatttaaaggtctgagagaatgaaagtccacagtctaaaagcagtaggagatgtaggaaaaaaactaggaagtggtcctttatgcaaagcaaaagaggaaagtttgaagaaaatgagttgattgaagttgtaagatgtcacagaagtcaagaagaggtctctgaagtgttcattggactggtcattatgatgtcatgagcactttagcatgagcagctttagaagtgtggttataggagaagcagtgaattaaagagttaaagtaattaagaaaacagagacagaactactgagtaccccccaaaagcaattatcttcaaaatatggaaaaccagattgggatacaaaaaggtttcttgttaaagataaaggaggcctgagtaagtttatatctcatgggaaaatggtaccagagaagaaaaggttgaagattagaagagttgaaaattaaagggccaaggctggttttttgttggtttgttttgttttgttttgtttttaaagagggttttactctgtcgctcaggctggagtgcagtgatgtgatcactgctcactgcagccttgacaccccgggctcaagcgatcctcctacctcagcctcctgagtagctgggattacaagcacgtgccaccacacctggctaatttttaattttttatagagatggagtctcactgtgttatccaggctggtctcgaactcctgatctgaagtggtctgcctgcctcggcctcccaaagtgctgggattacaggtatgaggcactggactgaggcttcttaaatggtggcaaggaacatattttgtgctttaaatgatttaagtatttaaagatcatagttttcctggcaacttactgtagagatcacttcagaatttccctgggtagagtagtgtgctgtagaagtatagtgttgtaagccagtgtggattgggagtccataccccttatttatctattctgtgtatcctattaataacagtaattatcaggttattttgcctttgaacaccttagtaagtctgagcatttacatggaaaaaatgctgggtttattcctcctgttattgtattttacaagtctgtcgagggtccacagtgatctttgccccataattgtaaaatgagatattagaatcatccttatttatcttaaccacctactccactgtacagttcctataattccacaaacttctctttatattggtttatgccttctttagatgattgtgaataagagtattatcttaacctctctggtgggtctacttctgtaacggttgtgggtcatgaattattttttactcagacataattatctttggtcttatataaagaaaaccctacagactccaccaaaacactcttggaactaataaacaaaataaagttgaaagataaaaaatcaacttacaaaaatcaatagcatttctatacactattgaactatctgaaaaataaatcaagaaaaccatgctatttacaatagctatgagaaaataaaaatacttaggaataaatttaaccaagaggatgaaagacctgcaagttgaaaactttaaaacattgatgaaagaaattgaagaagacacaaataaatggaaatatattttatgttcatagcttggaaaaattaatactgtttaaaatgtccatattacccaaagcaatatacaaattcaatacaattcgtatcaaaatttcaatgaagtttttacagaaatataaaaaacttccctaaaatttgcatggaaccacaaaacaccccaaatacccaaagcaatattgagcaaagtaaataaataaataaaacaaaacatacaaacaaaaaaatgaagctgaagacatcatactacctggcttcaaaatatacttcaaagctataataatcaaaacagcatggtactggcataaaagacatgtagaccaatggagcagaatacagctcccagaaataaatccacacagttactgtccactgatttgcaacaaaagtatcaagaatatacaatggaaaaaggacagcctcttcaataaatggtggtgggacaatttgatatccagatgcagaaaaatgaaactagacccttatctcacactgtatacaaaagtcaactcaaaatggattaaagacttaaacatagacctgaaattgtaaaactaacaaagaaaacacagtgggaaagatgaaagatcaataacactgatctgagcaatgatgttttttatatgaccctgaaagcacaggcaataaaagcaaaaatagactaatggattgcatcaaactaaaaagctcctgcgcagcaaagaaaacaagagtgaagggacaatccacagaatgggagaaaatatttgcaaaccacagatctgataaggagttaacataccaaatatataaggaactcaaacaactcaatagtaagaaaacaaataacacgatttaaaagatgggtaaaggatgtgaatagacatttctcaaaagaaagcacacaaatgaccaacaggtatactaaaaaatgctcaacatcatgaatcatcagaaaaatgcgaattaaaaccccaatgagatatcacctcacacctggtagaatggctattattgaaagaggaaagataacaagtgatggagaggatgtggagaaaagggaactcttgcacacggttggtaggaatgtaaattagtacaatcatagaaaacaatatggaggttactcaaaaattgagactaaaacaactatccagcaatcccactactgggtatatatccaaaggaaatgaaatcagtatgtcaaagacctatccgcactcccatgttcattgcagcattattcatgatagttcagatatagaatcaacttaggtgttcatagtggatgaatagataaagaaaatgtgaaatatatatatatatatatatacaatggaatactcatcagccattagaaagaatgaaatcctgtcattcgtgacaatatggatgaatctggaggtcattatgtttagttaaataagccaggcacagaaagacaaatactgcatgatctcattcatgtggaatgtaaaaaagctgatcttatagaagcagagagtataacagtgattaccagagatgggtagggcagtagtaaggaggagagattgaggagaggttggtcaatgggtacgaagttacaattagataggaagaataagttctggtgttttattgaacagtagagtgtagttaagaataatgtatatttcaaaatattatagaatagaggattttgagtgttctaacttcaaagaaatgataaatgtttgaggtaatggatatactaattaccctgatttgatcattacacagtgtatatatgtattgaaacatcagactgtagcccataaataggtacgtgtcaattaaaataataaaaatagtaaaatgtatagttacttccacggggtagaaaatgtggtatatattcatggtatactacacagccttaaaaaaagaaaatcctgtcatttatgacaggaaaaaaaaataagataatccaatgtaccatttgttgaaaatactttttctttttattgcattatcttgacatctttgtaaaaagtcggttgaccataaatgtgtgggcttaattctggactctatttcactcctttgatctatatgtttatcctttcactaaaagtagactgtcttgatattgtagctttataaatttgaaaatcagctgtgaaatcctccaaccttgttctacttgtaaacattgttttggctattataggtcatttaaattttcatataaattttagaatcaacttttcaatttctacaaagaattccgctgggatttatattgggaatgtttttaacatttagatcaatttagggaagatttggtatcttaacaatattgagtcatcagatcgtatgaacatatatacctccatttacttgggtctttaaaaaattgtctcagcatgttctgtagttttaagtattgaggtttcaaaagttttttgtaatacctattcttatgtattttatggtttaaaaaattctattgtaaatggattttaaacagacttttaatttgcagagactatttcttcctttccaatattaatatttgtttatttattttgtcattataatggctaggacttccaggacaatataaacagaagtggtgagagcagacattcttgccttaaccctgatcttatgagaaaagtgttccatattttacaattaagtatgtgctactcataggtttttcccaaatactttattaaatttaggaagtaccctttctggtttgctcagagttttatcatgattcattgttgaatttcatcaattttcttttaatctattgatatgagcatatgatttttcttcgttttactaatatgttggattacactaattgatttttgaatgttggaaaaaaccttccattcctagggtaaatcccacttagtcatgatatattatcttttcaaacattgttagatttaacttgtattttagtaaatatttttacatctgtgttcatgtagaatatctgtaaataattttgtaaagaatatcttttcttcttgaggggtaatgttttcattaggttttagtatttctaacctaataaaatgacttaggaggtgttccttcctctattttctgaaaggttgtgtaatattggtgttatttcttccttcagtgaaacattctgtgccagggattttcttttagggaaagtttctgataataaattcaatttctttcatagactttctattaaaaatgttaacactatttatattttatttcatgctctgtcaattttgttaagttgtattttttaaaggatttgtcagtttcattcaatttatcatatttttggcacaaagttgttaataatattctctcatcttttaacgtctgtataatctgtagtgataacatctttttcatttttgatattggtgatttgtgttctatcctcttttttatcaataagtctagctgagaatttatcaattttgctgatttttttcgaatagccagcttttggctttgttgatatattttctattgtttggtttctatttcattaatttctgcttttgtctgtattatttgccttcttatattacttcgggtttactttgctctcttttagattttaagtggattcttaggtaactgattaggtaactgacatttcttctaatataaaaaaattaaagccacgaatttattagtatgaactgctttatttgcattttactaatttttatatgtgatgtttttatttttattcatttaaaagtatgttctaatttccattatgatttaactctttcacccatttattacttaggagtgtgatcaagtttacaaatatttttggttttcctagctatcttgttgcttttgatttctaatctaattctcttttggtcagagaacatactctgcatgatttcagtcttttaaaaatctgtttagacttgttctgtggcccagcaacagtctatcttgatgaacatatcacgtgcacttgaaaagaatgtatattctgtaattgttgggtgtaatgatttataaatataaattattgttatccagattttctgtgtctttatttttttgtctagttgtcctatcaattgctcagagagcagtgttaaaaatcacctatcatcattgtgtttatctctttgtgcccatttttgcttcatgtaatttgaagccctgttattaggcacacacattgatgattattataatttcctgatttattgatccttttatcttcataaaatatcgatttgttgctggtcatactttttttcttgtagtagcttttgtgtgatattaatgtggccattctagtctcatgttttctgttttcatggcatattgctttttgttcattttacttttgtttctttaaagtatgcccttgttgaagcgtattgttggatcttgctgttttacccattttgataatatctgctttttaactgaagtgcttagcccattcacattagtgtaatatttgatatgtttagatttgtgtccttcaatacattatttgctttctatttgtcccctctgattttgttcttctgtttccgcttatctgttgtcttttgaattatttgggtattcctcagaatctcttttaatttttagatataactatttttagattttttttaatttgcattttttagtggttgctgtaaggattacagcatacatacttaacttttctcagtccacttaatagtgtacaaccttcataaaatatagaaaagttacaaccatataagactatttagctcttcctgtgccattgcttatgctatagttttcatttgtattaaatctcatacaatacaaaacccacaagacacagttataatttttgtttaagcagttattatgtactttagagaattaagaaggaaaaaaatagtcatttctgtttacctagtcatttaccatttctagtgccattaatttgttcctaaagagctgagtttatccataatgtctttttgcttcaacctgaaaaactttacttagcagtttttgtaatgcatatatgctgcagtgatttatcttagttttcctttatctgaagatctatttatcttccatttgaatgatatagaattctgggggattgacagattttattttcttccacttaaaaaaaatgttattctactgtcttctaatgctcatagtttctgatgagaagtgtgtagtcatttaagtcattattccctgtgtgcgatatgattgtttttgttgctcttgcatggctggggggacacttattttaaggttttctacttacctttggtttagaagtttgactatgatgtgcttatttatgcttttctttatttttatcctgtttatggttggctgagtttatcaaacatgtacatgtatattgttaaccaaatttgacaaatttttgttccttatatccttaaattttttaatcctaatttctctctatcctttctggactccaattacatacatatggtactttttaaatattgtctggttttaccatagtagggttaaagtttggtcctttaagactatacatttctttcatattcttgtatattctatattgttcaataggtctctgagatttattttatttttattttatttcagttctttttcttttcttcagattggatcatttctattgatctattttcagattcattgacttttgcctcttttagctccatttttcccaagatcaggcagtgagttttaatttcaaatattatatttttattgctaaaatttccattggctttcttatattttcctttttttctgataagatttcctttattttcattccttaccaataagttttcctttatcttattgaatatagttatagtagctactttaaagtcattgtccgctaattcccacatctgtgtcatctcaggtttggattcttgatggtctttacctttaggaatgcatcacatttttctggtattctatgttaggtaattttggattatatcttgatattattaatgtgttattcttgagattcatcattctgtttgtgttagtccattattgcactgttataaagaaacacccaagactcggtaatttataaagaaaagaggtttaattggctcacagttccacaggctgtaggaagcatgatgccggccatctgcttggcttctggggagccttcaagaatcatggtggaaggcaaaaggaaagcggctcatcttacatggccggtgcaggagcaagggacggggggaagtgctacgcacttttaaacaaccagatttcacgagatctctctcactgttatgagaatagcaccaagggggaaacctgccccatgatctaatcacctcccaccagggcctgcctacaaaattggggattacaatgtgacatgagctttgggcggggacacagatccaaaccatgtcattctgccactgccctcaccctccgcgaaatctcatgacgttcttacattgcaaaatacaattatcccttcccaatggtccctcaaagtctgaactcattccagcattaagccaaaagtccaaagtccaaagtctcatctgagacaaggcaactctcttctgcctatgagcctgtaaaataaaaaacaagttagttactcccaagatacagtgcgggtacaggcattgggtaaatactcctgttccaaaagggaaaaaccagccaaaagaaagaattataggccccatgcaagtccgaaatccagtagggcagttattaaatcttaaagctccaaataatcttcattgactccatgtctcacatccagggcacactcgtgtgagggatgggctcccaaggccttgggaagctccactcctgtggctttgtggggttcagttcctgcagctgctctcatgggttggtgttgaatgcctgcagcttttccaggcacagtgtgcaagctgcttagaactgctggtggattcccattctggggtcttgagggtggtggccctcttctcacagccatttcactccagcctgggcaacaagagtgaaactccatctcaaaaaaaaaaaaaaaagaaagaaagaaatttcctctgccaggtaccctaaactcatcattctcaaatttaatgttccgcagattcctacagcacaggcataatacagccaggctctttgctaaagcataaggaaagtgacatttgctccagtcctcagtaagttcctcatctccatctgagacctcctcagactggacttctttgtccatttcactatcagcacttcggtcccaatcattcaagtagtctctaggaagttctaagctctccctcatcttccctccacactattccaacctgtgcctggttacccagttccaaagtcactttcacattttcaggatctttatagcaatatcccactctcagtatcaattttctgtactagtcttttctcacactgctataaaaacacctgagactggataatttagaaagaaaagaggtttaactggctcgcagttctgcaggctgtacaggaagcatgatgctggccatctgcttgtcttctggggaggcctcaggaaacttacaatcatggtggaaggcaaaggggaatcaagctcatcttacatggcatgagcaggagcaggagcaagagagagagaagggggaagtgatacacacttttaaacaacaagatctcatgagaactctctcactattatgagaacaacattaagggggaaatccacccccatgatccaatcacctctcacaggccccatctccaacattggggattacaatttgacatgagatttgggcagggacacagatctaaaccgtatcactgttatatttctatgaagggtgttgacatttttgttttagtagagaataaacttgattagactaaaaatgcaaaatctttcttgcttctgcttggtagcagttcaaacttcagtttagttcttttagctttagcctttgctctttatatgtgattcagggacggcagagatgtgggaagaatttgatcatagaatttagggctcaccttcttttgttctgtgcactcaaggattctctacccctctcagttgtggattacagtgctgttgctcctggctcctcccctttgtccttaagctggagaaactagggattatctgtcagagttttaacttcctcatgctgtgtcacaaccttgatcagctattaggccaaagcaacaaaaacgggaaactcacttcatgctgattcttttctccaagttttagtgccctcctctcccaaaactgcctccttttgtttattccccagagtccttagatatttgctttatgtattttggccaggagctatagttgttatctctggaagggtctgtttattatgagcttactttgatctactagactgagcttcagacattgtgttttgaaatttttgcttaacattacatttatccaagaattaaatttaatatttatttatttttttcttcaacttttaagttctgaggtgcatgtgctagttgtgcaggtttgttacccaggtaaacatgtgccatggtggtttgctgcacagatcaacccatcacctaggtattaagcccagcatccattaggtattcttcctgatgctctccctcccattgctcccccaacaggccccagtgtgtgttgttccccttcatattttcatgtgtactcatcattcagctcccacacatagtgggacgatgtggtatttggttttctgttcctgcattattatgctgaggataatggcttccagctccatccatgtccctgcaaaggacaagatcttgttcctttttatggatgcatagtattccatggtgtatatgtaccacattttctttatccagtctatcattgatgggcatttgggttgatcccatgtttttgctattgtgaatagtgctgcaatgaacatacacatgcaggtatctttataataggatgatttatattcctttgggtacatacccagtaatgggattgctgcgtcaaatggtatttctgcctctagatctttgaggaatcgccacacagtctcccacaatgagtgaactaatttacaaccccaccaacagggtaaaggtgttcctttttctccatctgttgtttctggacttgttaataattgccattctgactggtgtgagaagatatttcattgtggttttgatttgcatttacctaatgatcagtgatgttgaggtttttttcatatgtttgttggctgcatgactgtcttcttttcagaagtgtctgttcatgttctttgcccactttttaatgggcttgtttgggtttttcttgtaaatttgtttaagttccttgtagactctggatattagacttttgtcagatggatagactacaaaatttttctcccattctgtaggttgtcttttcactctgatgatagtttcttttgctgtgcagaagctctttaatttaattagatctcatttgtcaatttttgcttttgttgaaattgctttaggcacttttgtcatgaaatctttgcctgtgcctatgtcctgaatggtattgcctagcttttcttctagggtttttatagtttcatacttttatgaattacgtctttaattaatcttgagttaatttttgtataagatgtaaggaaagggtccagtttcaattttctgcatatggctagccaattctcccagcaccatttattaaatagggaatcttttcctcattgcttgtttttgtcaggtttgttgaagatcagatggttgtaggtgtgtggtgttatttctgagttctctattctgttccactggtctacacgtctgtttttgtaccagtaccgtgctgttttggttactgtagttttgtggtgtatatgaagtcaatcaagtagcatgatgcctccagctttgttcttttgcttaggatcggcttggctataaaggctcttttttggttccatattgatatggtttggctgtgtccccacccaaatctcaccttgaattgtagttcccataatccccacatgttgtgagagggacccagtgggaggtaattgaatcatgggggcaattatcccatacagttctcatgatagtgagtgagttctcattaggtctgatggttttataagggctttttcctttttgcttggcacctctccttcctgccaccatgtgaagaaagacgtgtttgctttcccttccaccatgattctaagtttcttgaggcctccccagccatactgaactgtgagtcaattaaacctctttcttttataaattacccagtctcaggcagttctttatagcagtgtgagaacaaattaatacacatatgaattttaacatagttttttcgaaatctgtgatgaatgtcaatggaagtttaataggaataccattgaatctataaattactttgagcattattgccataacactgattctgtctatccatgagcatggaatgtttttctatttgtttgtgtccactgtgatttccttgagcagtggtttgtcattctccttgaagaggtccttcacttccctttttagctgtattcctaggtgttttattctctttgtagcaattgtgaatgggagttcattcataatatggctgtctacttgcttgttgtttgtgcataggaatgctagcaatttttgcacattgattttgtatcctgagactttgctgaagttgcttatcagcttaagaagcttttgggctgagacaatggggttttccagatataggatcatgtcatctgcaaacaaagataatttgatttcctctcttcctatttgaataccctttatttctttctctttcctaattgccatagccagaacttccaatactatgctgaataggagtggtgaaagagggcatccttgtcttgtgctggttttcaaggggaatgcttccaggttttgcccattcagtgtggtattggctgtgggtttatcatatatatggctcttattattttgagatatgttccttcaatacctagtttattgagcatttttaacatgaagggatgttgaattttatcgaaggccttttctgaatccattgagataatcatgtgggttttgtctttagttctgcttatgtgatgaattacatttattgatttgcatatgttgaaccagtcttgcatcccagggatgaagcctacttgatcatggtgaataagctttttgatgtgctgctggatttggtttgccagtatcttattgaggatttttgcattgatgcttatcagggatatcagctggaagttttcctttttgttgcatctctgccaggttttggtatcaggatgatgctggccttaaaggagttagggaggagtacctccttttccattgtttggaatagcttcagaagaattggtaccagctcctctttgtacctctgatagaattcagctgtaaatctgtctggtcctgggctttgtttgcttggtgggctatttattattgcttcaatttgtaatttaatatttttaaatcttgggttaaatggttgaatgaatgtgtgaaaagttagatatcaatgaatgaatattcttaaatgtataaactttaatcttgctggatataggataaaatttacattaaaacactgtaattaatcagtcaatttaagtaaaataaattcaaggaagtggtctgaatttctcagtgagcatttagatatttatgggagtcatataaaataaattataaatgtgactgagggctttttattaaggaaaatgaaatattgctatggacatgattctgtgtgtttctttactacactatgaactaaaaattttggagacaaatctaagtatataaattggtttattgatgaccgattgggaatataaataggcacaaaaatttggcgaagcattttggcatgtctacctaaaatttaaatatgtaagcactagtccccccttacctgcagtttcactctgagcagtttcagaaaataggtgagcacagtacagtaagatattttgagagagagaccacattcataaaacttttattatagtgtattgttataattgtcctaatttattattattgttgttaatcttttactgtgcctaatttataaatcacactttatcataggtatgtatgtataggaaaaaacatagtatatgtagaattcagtattatccttggtttcagacattcagtggggatcttagaaagtattctctgtggaaaaggagggactactgtacttttaacaaagcacttcccagaataaacacacagacatatacatgcacacactttcagaaatgcacttaaatattcaatcatggagtaaaaattaattatgaaatatctagacaatgaacattatgtagtttttattaagaaagaagcagaattatatatactgacatgaaaggatgttcattatatatgttaagtaaaaactaagttcatcatatatgttaagtaaaaaaaagtcacaaattaagagaaagtgttaattgatttgagagtttgtgtattttttttcctattttgtgctgaaaagctgaagttggcatcaaccaaggcatattgttatctatgtatcaagctaaataatttaaagatctttaagactattaattcagagatgctgtataaatagaatcagtgccagattttttgtttcaattctatcagccaagtatactatgctttctttgcttgtgatagaaaaaagagagaaaaaacacagaagcaaaaagtaaagttgtacaatagtgtgtagagtgtggttccattttgtaaaatgtatcagtgtgtatatttatatagcatagtcaaaagcctggagtgatataaattttctgttactggtctagtatacaagggaattagattttaaaggactttcattgtttttaacaattctgaacaaatttaatttggtacaagaagtatatattttaaatattattgaacttaattaaaataaattagagctcaaaaaataaataaatcacaggaagttcacagtctgactttatcaggaatgttgctattttcttaacaggtcatcaaacattatcactgatgcttggaaagaagcactttttataatttaaaaataccttttattcttcaacttctgctggcttaaagagcactaagtccacatatcctaggaggcatggctgtccaatatatactatgtgtacattgatttatgaaccaataaatgtttcatacacagttgagattttaaatgagcttatgataattggatcaaaggaatactagtccagcttgagagtactgcagaaaaccaatcacagaaagctatgatgaaattttaattataaaggatattgaatatcctagagtgacaactctgttataataaatgtaacactgaatgggaaagagagaaaggagatttttacccatttctgtttgaaatcaactttctatttctagtaaattatcacaccattctgttttaatttttatatcttaaagttatcattccagtgtctttggtttactgggtttataaaagaattgaccagtagctatataatagatacagaaaagtctgcctgggtgtggtggctcatacttgtaataatattatattattataattgttctattttattattagttattgttgctaatcttttactgtacctaatttatacattaagctttatcatgggtatgtatgtataggaaaaaatgcagtatatatagaattcagtattatccttggtttcggacattcagcaggggtccgaaggtgggcgaggtgagcccactttgggaggccaaagtgggcagattgcttgaccccaggagttcaggaccagtctgggcaacatggtgaaatgctgtccttacaaaaaatacaaaaattatctgggcatgatagtgcatgactgtagtcccagctacccaggagcctgaggtgggagcatcactgagcccggtggttgaagctgcaataagttttgattatgctactgcactccagcgggacaactgagtgagaccctgtctcaaaaaaaaaagtcacaaattaagataaagtgttgattgatctgagaatttgtgtatttttttctattttgtgctgaaaagctgaagttggcatcaatcaaggcatattgttatatatggatcaaactaaaaaattttaagatctttaagaccattaattcagagatgctgtataaatagaatcagtactagattttttgtttcaattctatcagccaagtataacatgcttttcttgcttgtgatagaaaaaaagagagaaaaaacacagaagcaaaattgaagaatttgtaaatcatttctaaataatttcaataaaatgagctttgaaagggaaaatttttagataacattatctcatcaaaatgccttaaagtatattttaatattcagtaagaacagtgtatattaacatggctaatttagaggatttatattttacccacatgataatgtattatgcctgtaactgctaaaggaattatgtagcaaaatctgtcaaggaatacacgagtgggatttatatcagaaaaatcaaagccatttgtaaagccccattacttaggcagaatatcataggtaggaggtagatgttactgaaagaagaagttgggatatgaaatacaaatctattttgcatcatgattttgttaagtccggctgtttattattaaaaacatgtacagaagattcaattgaagtttctaaaagagaaagaaacttgtagttgtgggaacaatagtattccttatgaaatacttagatattaatagcttgagactgataatacaattcttaagttaggggttgcatgtgtagtggtcagatgttatttcaggatctcaagaaacagagccatggtaaaaagaagcttcctggagcttctgataaattccgtcacctttttgggacccagtttcttcatcaataccaacctcattagggtcctgtgagaagtacatgaggtgagatatgtactgaaataatatgccaactcttaagtgccaagacattaggatgcaagggggggtgcccaaaaagtcaacaattacttgatactctagatatatgtatggataattttgagaagtaatccttcttacacagaggtgtaggtttgtttgttccaagcagcaaacataatgggtataggaaagagaaactgtggccttcatatagactgagcttaggaaaacagttggaaaacagttcaaattcaaggtacttcaacaatatctagtgtgtttttgaaatatatttttaaaacccctatccaaatcaatgaatgctttggctaaaacctacttgggaatgagggtgttctttagtgccaaatactcatcttattttagtccatgattttagtccatggctaaaatcccaagagttacagaggagaaatagggccaaacaaggtttctattaaaataagaggtcccaagtgatgaatggaaacttggaacaggtttaatggcaactataagccagaaattagctgaaatacacactaatgaatttggggcatatcttgagtttcagatagaaaattggtactaagtttagtgaattagaaacatagcttaacctaggcagttgcaattcttgttccaaaaatgctcaatttgctgctggactgcatggacacttgctacctccttgttttgagtcattaacaaaatgttgaatgggatatctggagtatcaagtaattgttgactttttggtcacccaacccccttgcatcttaatgtcttggcacttaagagttggcatattatttcagtacatatctaaccttatgtactcctcacaggaccctagtgaggttggtattgatgaagaaactgggtcccaaaaaggtgatggaatttatccgaagctccaggaagcttctttttaccatggctctgtttcttgaggttaaagaacatgatttaccaggctctgtttcttgagagaccaagagtggatccctgtagtccccattagaattctccttctagtttgaactattccattagtaaacactttttggcatgttatttaaacaattacaaaatcacctaactacactgtcttgcagctgcctttctttttttgtcttgtccacgtgagtatattgggagactttgtttaatgtctccacaaattctagatagactgttcctgcagcatttctttttttaaattttgttttgataagcatttattttggcaatgattctagtaaatgaaactaaagtgcccatatgaaaaacaatcttaagtctatgtggttagtttgaagttaccagtttttaattaagccggagtagtccttagtatgaatgccttcatttctaagtgctcataaacaatcactttagtaatattacagttttgaaggaatttatatcaagcttaatggcactttttaaaagataggaaattgggttctctagtcacatctgtaagttatttcagtgccttggaagatcatttatctggccacagataattgacttacttacatcagttttttttttttttgagatggagtctcgctctgttgcccaggctggagtgcagtggcatgatctcggctcactgcaacctccgcctcctgggttcacgccattgtcctgcctcagcttcccgagtagctgggactacaggcacccaccaccatgcctggctaatttttttgtattttttagtagagacggggtttcaccatgttagccaggatggtctcgatctcctaaccttggcctcggcctcccaaagtgctgggattacaggcgtgagccaccacacccggccacttatatcacttttatgcttcctatctccttattgatcttgaggttcaagtttcacttaaccattttcttcaatgaaaaataattttataatttaaaaaacctcaacctttaatattctatgattcttgttaggccatctcaattgagaatactgataaagaagtaaaactccccccaatactggctagtttgattttatctgttaatattacgcaatctgccccaaacctgtctctccctttttattgttacttatccaaagatggcttgaatctcttatggcttgaatctctttgtttattctaagcaattttcagacacctcagccaactatcaataatatattagttttttagaactaaaaatgtagaggatctccccctaaaagccaattgttaatgccaaatatttgactgatatatttcttctggaggaagggagatgtgaaaaaatttagccatcaagttatgtgaaaactttttcatcttcccatccactggatgttttatctgtaaataatgctataatcatattggaaagtattttccttctggggatgcatgaagatcaggaatcctattcgtttttaacaagatggaatttttaaaaactactttggacaactctaaacatcagagatgaccatttgtctcttttttattatataacttgtgctcggtttgtagagcaacataaatacatgaattaaaaaatgaaaactagctccttccctatttgacagatacttctcaacctcctctccataagatatgctctatccctatataggaaatttttctgtagcagcttgagtttactaaaaataagatctgaagaaaatgaagcaattaacatttattgagagtctataagggtttctacattgtgaaggagacagaaatataagacatggctcctgctttcaggttgcttataattaaagagataatattaaattatttggatgaatttaaaaatgacacatgccatcttacagatatgctgtagactgtgaaaatgaaaaaaaaaacctcgtgtttagagtagacactgtttgatggattaggtaggttttcatctggactttgaaatgtatgtaagattttataaggaggagagaaaataagaagctgtttgtattagaattacacagataaatttgtaaatttagttcttttcaaagaacattaattgagcacctctgtgccaagctccctactggatgctgtagattacagcatgtttaggaactaacttcatactctgttgctaaagtatttctgtgttttctaaaaaggtaaatctcttgtgaggaaacaaatctcttgaaggggttctcataacagaagtcccatttacttcatgatataaaaaggggctgttttctggttttgttctcaaaatgtaggatatagttctagacgtaattgggaaagcttaactttgttgcatacgcatcttccctatcatggttgatttcctatatggcatagttaaatgtgtttatccgtgtttgatatctaaagggccatgctacatatagactgccaactaaggttttatctgatgataataaattgttgtatttcatgacgacagcaacaacaacaataatgtacttaactagtcactgtgcaaattgctttacatacattttctcatgtaatcataataataaccgtatgagttttgcttactattgttttccttaattaaaatgagtaaagtgaagcttaggctaagtaacatgtccatagccaaacagttagtcactggcaggagtgtgactgactccaaagtctatattcctaattactgtgttctactttttaatagagagctcttgaaggtccaaggaaaggaatgcataatggtgtggtcaaggcattagtgttaatatttgtagaaagggtaattaacaacagtctgagcaatcacattctaacaactagtaaggttggcaggagcctcagtataatggtgtgaggaacgaaatcattatagtgccaaatagagtataccatctctttagtacaatgtctttcaaaatgaggctgattgtgttggctttatatttgactccttaataattaaggcagtaaattctagctggagctaaatacctacaaggcctaaaacagcataatggacaacctggcaggtgtccttgctggaagatgacaagagtgctgaaaggagagtcctggtttttctcccaagacatgacatttgggggcttccattaaaaaattaccaagcctctgccactgtaatctcttccttaagtgcctatgattttttcacagtcacaggtctatgcctggtcaatacccagtggccaggtctctgagctgcgtgcagagatggcagcgacttggagggctgggaggagataaggggaggaaagatcacttttcatgacaacttacaacttgattccacttataagccatttattttcagaaacaagtaatgggtgaggacacaggccaggtccacaatttgtgcacttgagagattaaggcctccgagatcaaattaccacagcaaactgagacagaattattgtagggatgtttggggaggatgcagagagaagaggaagaagccagagacccaagaaaggagacaggaatagattttgatgaaaattgcttcctactctgtacccttgaggaaacaaagaggacaaataagaagcagcagtgataggaggctgggcgcttctctggaataacactggctaggtagtggagcattgatagtgagtgtgcttggttggtggaacgaagggatgtgctagttcaggcctttgaattctgggtgtcaggatcacaaccttggctcctttaactgtccgctctaggagggaagcatgccaaatgtcaggtctcactctgactttgttccagtccatagctagaaaatgacccatagaggaagatctacagatgacagaatactgggagatgaagagaaaggacgttttagtgagtgctttttttgcacatgaggcaatagatttcaaattcctgtggaagaaatgtgagaacctgggaagagtgaatattcagaactgagcagcagaggcaatgacacagcatggaaagatttcctctgatccttctaccttctcttttactgaagtgaatttgttgtctctgtgttgcctctatagcagtacaagaggaaacttggggacacagaagaacagaagtctaaggagtcttatatttaaggaagataagctgcagtcattgaaattgctggttattgtaagataaatcccagactcccacattttgcttaatgacagcagatttttttttttttttaactgcaaagcattaatggaatccaaattccagcctggcttaggagatcaacagtaacgctcttgatttaatggttttgcagactcttgaagacattgtcatccattaaagaaaaaattttaaattactcttgaaagaaaatgtcttgggtgataaatgtaaaagatttgaagcaagattagaaaaagcttgagagaagaatctctttaaaaattttaccagattttccccattgtcgccaaaatgggtcaaataatagatttgcctacagcttcatggagactatttttttaaacagagcattttaaacatttaaatattggttatttgccaaggcacacactgaaaataagggccacttggccgagagcagaattgagtcttggatcccaggatgctggttttaggcttgctcccggaaagagggcagcatttgccatccccctccttttgccctaggagttgagcactttctgcagtacttaagagtgtccagggaagatgtgggagtcaggtgaatagttcccatcgccagtaaccccagagcgcctccccctgcgttgtttccttttaatgttagatccgccgcctgggtgcccatacttagctaaggcccctcagtttattttcctgaattgcgcttggagatcttttcctggggagctgatagccagacttctaggggcttgactgcttttcccagactaatctccttaaagacccgttaagcaggggagagacggtggagactggatgaactggacagtgggggtagggagaaagggagtggccgtgttcctgcggtccgctgggatccggcaggtccagggtgaaggagatggggctggagaggctgagcagtccgggttcgctgtccgccacttcggcgcggaatcagagcaggacttgctgagccctcctaccgctccctttccccctccccctctgtcttcccttctgtttccttttccctccccctggagctgtagcggcagcagcagcaggaagccgagccgggttgagcgactcggaggcgagcggaggagctggaatatggggagtcagcgaggacggtggggccaggagcccttgggagggcctacggagggagcggccccaggcgctttctagagcgtgagcggtgggggagcaggcgcagggtggcacgagcggaggcggggcccgggcgtggggcacggctggggaagctgccgcctccggccctgcccggctgcctccgccgcggccagtggctatggagcaggcgggcaccagacctgcggcgacagagcatccacggctccggcggcccatgccctggctgctgctactgcctctcctgctgctgttgctgctgctgctacctggccctgcggcctcccagctgcgatactctgtgccagaggagcaggcacccggcgcgctcgtgggcaacgtggctcgcgcgctggggcttgagctgcggcgcttggggccgggttgcttgcgcatcaaccatctgggtgcgcccagtccgcgctacctggagctggacctgacgagtggagcgctcttcgtcaacgagcgcattgatcgggaggcgctgtgtgagcagcggcctcgctgcctgctcagcttggaagtgctggcgcacaaccccgtggcggtgagcgccgttgaggtggaaatattggacatcaacgacaactcaccgcgtttcccgcggcccaactaccagcttcaggtaagcgaatcggtggcgcctggagcgcgctttcacatagagagtgcgcaggaccccgacgtgggcgccaactcagtacagacctacgagctcagccccagcgagcacttcgagctggaccttaagcccctgcaggagaacagtaaagtgcttgagctggtgctgcgtaagggcctagaccgggagcaggcagccttgcaccacctggttctcacagccgtggatgggggcatcccagcccgctcgggtacggcacagatctctgtgcgtgtcctggacactaacgacaactctcctgcctttgaccagtccacttatcgcgtccagctacgggaggactcacccccaggcacattggtggtgaagctgaatgcctcagacccggatgagggctccaatggtgagctcaggtactccttgagcagctacacgtcggaccgggagaggcagctcttcagcatagatgccagtaccggggaagtgcgagtaattggggggctggattatgaggaagcctcctcctaccagatctatgtgcaggcgactgaccggggtccagtgcccatggcaggtcactgcaaggtgctggtggacatcgtggacgtgaatgacaatgccccagaggtggtgctcacggacctgtatagcccagtgcctgagaatgctacacccaacaccattgtggccgttctcagtgtcaatgaccaagactcaggccccaaccggaaagtgagcctgggtctggaggccacactgcctttccgactgaatggctttggaaactcctatacactggtggtgagcggcccactggaccgagagcgggtggctgtctacaacatcacggtgacagccacagatgggggaataccgcagctcacatccctgcgtacactgaaggttgagatctctgacatcaatgacaatccaccaagcttcctggaggactcctattccatctacatacaggagaacaatttgccaggtgtgttgctctgtactgtgcaagccacagacccagatgaaaaggagaatgcagaggtgacctactcccttctggagagggagattcaagggctgccagtcacctcctatgtctccattaacagtgccagtggcagcctttatgctgtcaactcctttgactatgagaagtttcgggagttctttgtgactgtggaggctcaggacaaggggagcccaccactgagcagcactgtgactgccaacgtatatgtggtggacatgaatgaccatgcccctcacattctgtaccctacctcaaccaactcgtcagcagccttcgagatggtgcctcgaactgcccctgctggctacctggtcaccaaagtcatagctatggactcagactctgggcaaaatgcttggcttttttaccatctagcccagacttctgacctggacctctttaaggtagagctgcacacaggagaaattaggactaccaggaagatgggagatgagagtggtagcactttcaacctgaccgtggtggtccgagataatggagagccatcactatcagcctctgtggccattacagtagctgtggtggatagggtttccaaaatcctccctgacactcagaggcatgttaagagccctcggacatactctgaaattaccctttatctaataatagcattaagcacagtgtcttttatatttcttttgacaatcatcattttgagcatcatcaagtgctaccgctacactgcgtatggcactgcatgctgtggaggcttctgtggagtaagggaaaggtcccctgcagaactgtacaaacaagccaacaacaatattgatgccaggataccgcatggcctcaaagtgcagcctcacttcattgaagttcgagggaatggctccctcaccaagacctactgctacaaggcctgtctgacagcaggctcagggagtgacactttcatgttttacaatacaggggcccagacaggaccagggccttcgggagcccaagcagcagtgactgacagcaggaatctcacaggccaaagtggtcagaatgctgggaacctgattattctcaaaaatgaggctgtttctcaaaatgaggtgagacagtggtcagggggtcttctacaaactcatgcatttgttacacatcccccaatatcctgtgatttggctttattgagtcattaacagtgacaagagttatctggtaaactgagtatatatagtatccacaatttgatcataatctgctatttcctctctagaaaaatagcactaaagaattgttttatttttcattttcagaggcatgaagccttgtccataaaattgtttgagaagtgaggattagtcttaatatttaatgctaaaacacagatttgtagagaaacaggacaggccttggaatagggattatgttttagggagtaatgttatgagactcaaggagaaatggcctctgctgtatcatctacagggaaatttttcttttgaaatcctatatgagtgatgtttcttaaaaagctctgaggcctctaggggctatcatagtcaccactatctgctgtctctgtttatactctggactgtctacagtggaaattatctagttaatatttctggtacttgcactgaacctatgtgataggatcctctggaaatgcatgtcacaagtgataaagctgtagtatttagacatcatactgaagctaaagtttgctttggctgtatgatgtggcaactcttctgtagagggctgtcagagggagtggatgatggtgaggcagagagattaagtaccaatttgtctggttggtccagggaggtattagaatgagtggattaggggtgtggggggatggtgaagaccaagagaagctgggattagaaggaagagaagggaaaaagaattctcccaatagtcacctttcttggcatactctgaattcattgtaagaggatttccctgaatttagcttaaatgcagcctgtaatcttctgattttctgttgacagtttctatggttttgatgagatgtaaagtagccttttcaagtccttcatgtctttaagttaaatgacagtacttccaaagcatgcattcattttctggatctaaaatttgatttgctatagcttcaaaaggctggcttggaaagtggatggcttaccctacagtaaggtgtagaggcaggtgttagtatatgcactagttttgagatttaagtaggtataaggccagcttgttcattattatgaagaatgtacataaattattagaaagtagatgaatatgtgtgtgtgtttgtgttgtgtgttcgtctccatatgtatgcttgaaataacagagatatgctttgtgatacttaaaacttggatttcaaaagccaaaattttgtaccataaatagtgatgaattgttatctttccaaataactactttgtagaaagggcttttagagctactacacaatgtgtgaacaatatttgtctctcctctattttttgcaatatattttcattgacatattgctgtacatacatattgtatgtaatatccatattgttacatttcaagttcatggtaatcttgaggaatgtaatgcacaggcacaaaagttccattcctgattgagagtagatttttctcatggacatttcagatagatttattcatttatcagaagtgcctggtgttagtcaatgctgagaaaccatgggaggcagattgtagattaagaaaaatgggggaataaatcaaagagtttccagaagtctttagatcgtagcatttgaaagcacgtaaaagggtttagctttaaataaggttgctgtagacatttgcttaacaaattcttgtgaagccctttgggattggggtgggctacaggtggtgaagaggcatgaacaagtcaggccaggctcagctttgccaccagctgtaagccggaagctcagaggaaagacactgttaccctccctctcctgactcaaagcttggggcaatttgatacataaactatttctgtcttacactgacctgtatattaatatgtactttggtacacaaacatttaatctagggagaaaattatttcagaaagtgcttgcttttgggagattttgccaggagagtgcatgactttaataaaggcaaatttctgccaggcacttttggaaatccagtgaagaaccccaagatctacagctccagaaatttttgcagttatagggagagagtgtcacattgttacagtgtggcaagataggagcaaaagccactcagttctgaaagtcatcattgccagatcaacctgttaaattcccatgttgggctttctttttttcctacctagttactacagatggcaggagagtcctggggtacaattagtaccatgtgcctacattaaaagtagatgggaattagagaggaagagtaagggaatttgtactcactaaccaccctgctatatagatatatgtatatcatacatatacacatacatatatctcatattactgaatcttgaatattattcaagattattcaatatattgaatattataatattgaatacatatatgatttcattacctgcaagtcatgcgttaaatatttgttaacatctagcatatgaggaaataagctcagggaggttaggtaatctacacagccacactgctagtgttattttaagttgtatccatctgactccaaaaactttttttcaatactatgagtagacagaagttccaatgtttatattcccttttatatgggatattcaggcatttaagctatcactaattcacctagtcgtatatattaactgcttttggaaaaagagtaatttctggcatagaagcaggtaacaaatgggaatatcagtgagttactactatttttttatttttatttttttgagacagagtcttggcctgtcacccaggctggagtataggtgtgaatatggctcactgcagcctcgaccttctgggctcaagcaatcctcacacatcagcctcctgagtagcttggaccatagatgtgcgccaccgtgtctgactagtttttaggtgttttttttttttggaagagatgggggtctcactatgttgcacatgctgttagtatatttgtatttgtttatttgcttcactattggcaaaccctgttaagatcttttatttttattatttcactgatttttctcttgttgcttattaaacatcagcatttaaccccagactctaatctgttggtagattttacccccagtgagcttatttcataaatcacttgtgcagtgaggattctgaagtaactatttggcaatagggcagaatttctctttggaaatttctgaacttgatactgaatgttgttggcactcccttcagagtctccataaaaagaaaccaaattttttttttttttttttttttgagatggagtctcactctgttgccaggctggagtgcagtggcgtaatcccggctcactgcaacctccgcctcccaagttaaagtgattcttctgcctcagcctcctgagtagctgagattacaggcacgcgccaccacgcctggctaatttttgtatttttagtagagatggggtttcatcatgttgtccaggatggtctcgatctcttgaccttgtgatccacccgccttggcctcccaaagtgctgggattacagatgtgagccaccatgcccggcaaaggaaaccaaatcttaaggtagattctgtgcatttgtggtcgtggtgttgtgattgttaatgagtcactttgagtactctagtagatttgtccaacagtgtctcagtgggcccagctggcacaacatgtagaaattatgaaagagtagcagagatgaattaagtttgcattcactttcacttattttaaagcaatttgtagtcaccaaaccttcagttatttctgccactatgtgtgcatattcaccctaattccaggtatagtgacctgaaagagttaattcttctttcagtggcacctacttttatttcccccagcactgatttttctatctgatgactctatcctggaacagagtttacactcgttgtaaagtgacatagtagtgaatttataaaaattgcacaatggtcagaatagacaaagaaatcatatctatgagcttccactccagtttttcatcctctgatggtcactttataatgactggggctgttttagtttgcaaatttcatattggtcacaggactcttcttctgagaaaaagtttattttctttggtctgatgatacaataatttatttcaattacctctttcctcaatttttctacagactgctgagccagatggaattatggctgagctcttctctgtttctgtatcttgtacacattctgactgaagaagaaatctatttattgtagcttgaatgtcattggcctactgtttccttctgacccaggagtgagccatcacatgggcatctggtctaactcagaacactctgcagggacacagcctggcatattataggttgcctattggcatgctgtctacttgacagaatagcaaagtcagttctgggtacttgcttgttgcctaccaatttttgctctcaatgagaggtcagaataatgtcaatttgcaaatgtttgaggaaacattcctgtcaccaaacccagaggtttagctgaatatgatggcattttacaggtgtctttaaatgtggcttttacagaacttcacctggatcaatgttttgtgcatgtgataatacaactataaatttagcttattaatatgataatatttggagcagtataatctataaccatgacttcaaaaatcaaaggttaaaagtattcttttgcagtgttttaaatctgctaacctgaaaactatacaagggtttttctttcaagaattttaacttgacaaatgcaaaggaatatccaacattgcaaaggtaaagagaaatcttagttccttggcatataagcaccatcagttcctttctggccttccagggtcagaactctgggctccaaggaggtacaactgtgagtgagagagtagctgctgtgctagcaggctatgcatccagaactaaacagacctagcactttctgttgtactggaacccattaggtatgttctaaagttatgtttattttactttcctggtttgtaaattagcattttaaatgactacattcagaggaaagtattccacccagaattctcaaatgtattacctttgtgttttattttattttagtttttttgagacggagttttgctcttgttgcccaggctggagtgcaatggcatgatcttggctcactgcaacctctgcctccagggttcaagcgattctcctgcctcaacctcccgagtagctgagattacaggcatgcgccaccatgcctggctaattttgtatttttgggtttcaccatgttgttcaagctgctctcgaactcctgtctccaccttggcctcccaaagtgctgggattacaggtatgagccactgcgcccagccctcattttgatatactagaagaccaatatgcaacataatgattattttaaatgttatattcccttttgccttaatgcggaacagtctatgtatcccttttctgatgatttgtaacaaattaccacaagtaagttgtttaaaacaccacctatttgttatctcacagtcctgtaccatgtggctgagttgtccgctcaggtattctcaaggctgaaatgaacacagctgggctgtgttgtcctttgcaggctcttaggaagaatctactatcgagctcattcagattgttggcagaatccagttgtttggggactgagatctctgttttcctacttactattggcctggggtcactctcagttcctagagaactgaggactcaggactcttgtcccatggtctgctccatcttcatggctggcactggagaatcttccctcacatggaatccctcttatgcttcagatctctctgatttctgtctctgacctctagacccagatttaaagagctcatgtgattatgtcagtcccatccagatgatctccctttcttaaagccaactgtgctacatagcataatgtaatcatgggaataagatccatcacaatcacagtcttggagactattcagggtgtgcacaccaggatatagggatcttggggccatcttggaattctgcctatcagtttatatcaatgttcataaaatagcactatgcaaaatctgcagtggatatattcttaatacagtcctattaggaaggaaaaggagatattatatgcagtctcatgtcccagagggcaatttgttgatgtcttccacatggatttccatggtacgaagatagcatattatttcattgagtagttgtgtgagtttattaataaaatagggtattttaaacttattttactttaaatcttagaagaggtgattcatccttctgtagctcaaatattctatgtcataaatcacagataataccattacaagataaattaaatcttttttataattttaataggaactgaagtgtattcttattcttcagtaatactacatcacccatatggactacctaattgattttttccacatatggagttttgtgaccattattctaccaaaagactaacctttgaagcaataggacatattagagttcttcaccaatagaaagtaagcatagtcctgggaggtaccatctaagtattaaagaactaaataatcacagttatttcaactgtgattgaaattgtgatagtaatatatgtcttactgtgtcagatatatcagtagtcaacttttcaacttgaatttttccaagtttaatcaagttctggatgaaactcatgtacattttactacttttagttttgtattgttttaaatcaatatcctggaaactcagaagtaaaaaagagaaagaagaaaaatatatgtcatttcatgtaaatttatttaaaacacagacttttggcaaggcacagtggctcaagcctgtaatcccagcactttgggaggccgaggagggtggattgcctgaggtcaggtgttcaagaccagcctggccaacatggtgaaaccccatctctactaaaaattcaaaaattagccaggtacggtggcagatgcctgtaatcccagctactagggaggctggggaagaagaattgcttgaatccgggaggcagaggttgcagggagccaagatcgcgccactgcacaccagcctaaatgacagagtaagaccctatctcataaataaataaataaatataaataaaacacagacttttgtgttaaggggacctaaacatgactgtcagctgaactcagcaatcagacaagtaatttaatctctccaaagttcagatgtctcatttttgcaatttaagtacaataatgttgactttgcattatagttcatttatttaaacacattttaaaaacctcccagatgccagaagcctgctagactctgactatatagctacgcttttatgaatatctgaagatatgcatgtgtctaatgagcaaaacagatataatccctttcatagagtttactgtctgacaaagaaagaattaggatacatgcaacagtatgtaataaagtgcaaaatctagtactgtgtagctacttaaaacatattatatgctttcttcctttccttttccctgcctgatcttactgccataagaaatcttgtaactgtgattctgtcaaatgaatctaagaaggatgttgttgctgatggactagtatagaaaatagcagcatgacaaattaaatgtgtcattggggaagtgagattgtataatgaactgagtttcctggtcagtcctgctggaactgtgcctttcagcaaaatgagtttgatgatttcattccaaagatcaagttgcagcaattttcatcatgaatgttacccaatcatagaaaaattggcaacatttctcagcagatgttacagtctttctcaaaggaaggttctctcagctgacaagctaacgatagtgctcctgatggcgaggggagagacggtgatgatgactgattgataaaaagtattttagtcatatttccaggtttataaaatgatttgcaaacattttcttttgttccctctaacaccgctagtagataatggaaactcctttgatttggtctgtagataattttatgctatgttatatggaatatccacagcattttgtgaacttgaaaacaaaggaggaagcagcttgcatatgcatatcttgctagcagattggtagaatagagagagcagttagcatgtgaggaccattgaggtaaagtatcccagagttgtaactttttctgggccttgactttggctaattctctgcatgccaaatatcatgtagccatccagaaatctgtctgaatattgagatggtgatcatttctctcctgggtgttatgaagaaatgtgtttattaaatactttgcatcccttaaaggaactatatgaatgataggaataagaattattgacagttttgaatggtctattgatattactatggctttgtttctaccaaatatggtaagtataatgtagaggaaaatacaaaatacaacttttatcccccatttttttcattcaactatacctcaatattcagtgacagggccacctcaatctccgcccatgaaaacgcatctagaggagtgtcacaagtttttcacagtgacatttttgcttactgatacaagacagtgatggtgactgatgatgtcccagtgatttctgagtagcttctaaccagcacataactcccccaacagtctttaagtctttaggtgcccatattttcctctttgttctcccccttcagactgagagtttgtagagagagggcaacagatcttttcaatacacaactaatgcaaaatgtatcaggtttttcttggatttcagctactccctgttaaacaatcagagcttagtgaacagtgattcagtgaggagggaaagcactcaggaaggagcaggaacaagtacaagtttatgaaaaggattagctagcaaaacaaggtcaaactctgcaatagtttgttttcctctccctagtatccctcttcaatcagaaaagagactgttatcagttgctggtgttatgactgggcacatccgccctgggtcaaatatgctgcagtctgcaaagccagcagcagattgcagtcctctgcagtccagccaggccagcagaacttgtgtagccatgtgccctgttatagctgtaatactgaattgggaatgttcccttaatggggcacttgagggcaaaagcagtgaaagcttttcctttctcaaagcagactgttcttcccgtagtgttttaagaacacagacatgtattgggcaaggcaaagccaaaggtggcctttacaagattattaaatctggtcttccagggtatctaatctgtgtgaggaccctgatgaactaattttcttctaaagtgctatatatgtagatatcatcatagagttacacatgaaatggctcattcaatacttttttagatgcctggaaatatttaagggagtaactaatcaattagcagcattcctgggagaacattgtcttgtcattttaacagaaaactctctttgtgattttgcagccacgacagcccaaccctgactggcgttactctgcctccctgagagcaggcatgcacaggtatgtatttccctcctcattcactcagaagtaaccttaacttggtatggctcagataaactgcatctccataggccagaagcagctgtcaaaactaaaaagctttaggtactttgccaggaaaatgcaattattttgtccccatgtttattccttgaaagatcgcaaatggtcagtgccagatgcttatcaagtgctggcatataagagtcctctgtaaaatcacagaaacaggctgctatgtattttctcccatcaaaatttctacagggaagtaatttcaacctccttcatccctctctacctatgctttcttttcctcctttaaaaactgtaattaatactcatgctttgagacttgggtacattgtgcaatgtatacatacatgttgtctaccttgttttttttttaatctcacattggctattacatcctattaccctcaataattgattgctattgttgtttgtgttcacacctattagagcctcctcatctttcccatctgttgctatcttattgtcatcaatgacatggttcttcagaagatgagccatgtaaagggctccaaatctagcttactttaaattaacctagagtaacggtattagtctaagactcagattaaatataattttgctttctctactttgtctctctgacagtaattgattaactaccattatttctggaggtgatccagtatccatgccatggggccaaataaaagattcattatttgcgaatgtctttggaaaccaaatgggaaggaccaagaaacaaatgatcacaactatcaaaaggatttaattttaaagaagaaataatcttcaaacttaagcccctcaaaatatctgggcaactatcaagtgaatattcaccaaacttagatcagttcgtaaagagaaagcctacaaagtatgtgtagagttaatgtgaaattagttttagcccattaaaatgcattagattgaaataaattaacatactctcaagcattacaaatgagcagaaatcattacattgggtgctatttctgattcagaagcaatcagtgaagggctgaagattagtagttggcttggtaagatgtcacattggaacctgggtcataattttaggccagaaacattcatgcatataccagaatattaggtatcagaagaaattctttatatttattagagaccaacttgtgcttttgcctgcatctgagctgttggtggagacatgcaatgggtaaaagcatggtttacagtaccaactcttgaaaagtaccaaagctatgagttgtgccttaaaaactacatttgaaataaaacattaaaacataacttcctggactgggcgcggtggctcacacctgtaatcccagcactttgggaggccgaggtgggcagatcatgaggtcaagagatcgagaccatcctggacaacacggtgaaaccctgtctctactaaaaatacaaaaattagctgggcgtgatggcatgtgcctgtagttccagctactagggaggctgaggcaggagaatcgcttgaacccgggaggcggaagttgcagtgagccaagatcgagccactgcactccagcctggcgacagtgcgagactctgtctcagaagaataaataaatgaataaaataacataacttccttatcccattttcaaattgaaaaaaaaaagccaaatgtgctcctattcgggtttcaattaagatattatgagatttgagtagggtaagaaataaaataaaaattgaaattaaaatgccatttcttttttgcattgtaatacattgaacatattaaatgagttgtgaacctaaataatactaatctttttcgtatgtgtgcttgggtgttctcggtctttccagtcttggacatcatgtaactattctttaaaaaattctgctttgagctgagctggctccaggatagttacaccttcatgaatctgactgagcccacacaatttgctagtaggatccaggaacacttgaaggctgttaatatttggggaaaaaaaacagataattctagagtgtagacaaggggaagaatagtaaaaggtcagagtttaatgagtgaatttctactggatatgttgtttgaagtcaaagagtgagaaaacattgaacttatatgttgccttccctctaatagttcaagtttgcctgctctgttgcctcatataacccctttagtcagtagtctaaattttattttagaaatttaactttcaagataagcaaatgtctagtttaaaagggtcctctagtctaggtgtagtggctcatgcctgtaatcccagcactttgggagggtgaggcaggtggatcacttgaggtcaggagttcaagaccagcctggtcaatatggtgaaaacctgtctctactaaaaatacaaaaatgagccaggcatggtggcgggtgcctgtagtcccagctacttgggaggctgaggcaggagaattgcttgaacctgggaggcagaggttgcagtgagctgagatcgtgccactgtactccagcctgagtgacagagtgaggctttgtctcaaaaataaataaaataaaacaaaatgttcctctaattttgatgagggttttcttggacattttctcttaggatcccacttatttcttccttcctttcttccttcctcccttccatcattcattcattcattcattcattcatccaacaaatatttgagagattaatatgagttagtattagacatacataaatgaatactgcaccatgttctcttttcccttgaacagtttatgttctatctctgcttgcctctaaaggtctcccagtttgtatctcactcccagcaatgttttatgctgaattaatctcttctgagcggggatctgtgagtggtggtgatcaagtttctctagtctcaggaaatatagggtgggtcatctatgcataaaagatatagaaagagtaaaatagaaaataaggttaagaattaattagatagccaaattggaacaatactccaattatcagaaaatattttagtgtgttttcttctttagagtagagaacctaggaacaagagaacctgcaagagaggcttggaacttttgagaacaagccctcctcatctgcttcagtatcgagatgttaaaatggcttagtcctctgatgggcttcctgttagatttagtgagcgccacatggcgttaataaaaaacagaattgccataaagatagaacatgtgtgttcctggaatagtatagcaggcaataagtaagtcagcaatgcttctgcagtttatgcagggtgactgctcagcagtaattgcttcagttcaagcatgagcagaatgtgttagctgcagccctggcttcatagttgtaagcaatttctgagggtggaagaagagatgggaaagaatttatgatctaaccgttatctgggtctgtgtgtttattcagctctgtgcacctagaggaggctggcattctacgggctggtccaggagggcctgatcagcagtggccaacagtatccagtgcaacaccaggtaaagagctggggtctctccattctttcttggtttctggaaagtgatcagatgacctacttttgtaagatcaggaatgttgatggctctttttcttttatatttttgttattcccttttttccatacatacatgatttccttacatatatgattattttgattttatacctaatgctcttcaggagttgaaaaaggataacaaggaaagtgtgtgtgcacgcatgtgtgcatgtgtgtgtgtgtgtatgaagtttttggggtttgtttgtttgtttaaatcaggtacctttcaaatgcttaggtcatccaagccatgcagagaagatctggtggccttatgcacagagatgacactgttaacaaagatcttttggttgaagactatggaaacccacccaaagtagtaaggaaagaaagagaaaaagaaggaaagaaagaaaaaggaaggaaggaaggaagatggtttctcatggaagtggaaaattatcggaaccaaggcattgttttgagttcaagtcaaagtcaatctgcttctctctgcacatcaacaacattctgcagactgacttttagtgccttggcatgcatgttgccaaacatgaccgcctcacaatttcttagtttagagggataatagggactatttcctaatccaaactttcaggaaagagaacctgctaagttgtgtaaaaaacctaatggctgggtgagtataggaaaattgcttaaactcacatttgcttggtatccttattcttgccctatcactaaagcagggtcatgtaatagaaatatggctttggaggcccatcgctgtggcagttttcagaaagggaagattaagtgttggtagagaccacaaattgtgtctactctaatcctctattaatagaacatcatgatgataatagtagttactaattattaagccataatatgcctagacactgtgccaagtacattgtatgtgtggtctcatttattccttaagtcaagcttgcaagggatttattacatctattctacatatgagaaactggagaggcagagagattaagaaatgtacccaagttcacgtagcttgtaagtggcagagggtaggattcaaacccagatgtgtttagtttcaaatccaagtatatctagcacttatattcataacatggctggcttgcaataatccattcaaattcaaatacatatctacatacataacagatgacagaatgtgtgtgtaaaaggttttttcccaaaaataatcagatgcctttcaaattattaagtaacatgcagctaagggcccatttttactggcaactttaagggcattcgttgattctaatcagccaggatttgctatttatggatgttgcacaattcaactaaaagtcacatttgtccaaaaaatatacgagttgaagcaattcattagagagctaatattgccagattgcaaggggaaaaacataaaatagttcattgacaaatctgtaccctcagtgccaacgatggagtgaagaaatgatggaggaggaagtggttttagactgccaagtgttgcaggatgtggaggcatctgggaaggtgagaacttcccaaagaagccacgtgaaatcatgactttctaccttgcctttatttcagagtttttcttgctcttatggaggcattgtaggtcgacctggtaagccacaaactaactttgaatacattctccctcccattggtgatgctggttggtgtgtattcctaggcaaatgtggaataggaaccatgtattgatatttcatacatctggccaagtccctctttcagattcaaaaaatgttgagaacctatcttttttacagagatagagaaggggatctcccttgttccctttcttactgtcccagcccctcttgtataacccattttatccagaactgtgcctggctgctgatgcatgagtcacagtcttcatggactgtgctggatagagcttacatcttccaactactccatggcaacctaatcatacttttcaatacatacctctgcatcagtggtgtaaagttaaagggattctctgccttctccctgtccttctggtacttttaggtttttaggactcaatatatgttctgcactgcttggagggaatatggcataaagattaagattatgatttagagtcagatttgagttgaattctaatcccaagcttacttgctgggtgagcatagacaaactgcctgaattcatattttcttaattaccctttctgtaaattgggtgtagtaataataataacacctattttattgagttaccatgagaactaaaggagaaaaaaagaactgagcatagtgcttgacatatagttaataaatgtctaatcttttttttttgagacagagtctcgctctgtcccccaggctggagtccagtggcacgatatcggctcacagcaacctctgcctcctgggttcaagtgattctcctgcctcagcctcctgagtagctgagactacaggcgtgtgccaccaagcctggctaattttttgtgtttttagtaaagacggggtttcaccgtgttagccaggattgtctcaatctcctgacctcgtaatccgcctgcctcggtctcccaaagtgttgggattacaggcgtgagccaccgcgcctggcctaatcttcttactcttttttctttctggactacttttctgcaatctatgatatagtgttggctgatagcctggtggccagaattcagtagttctcatttgcaggcccagatatagaccctctgaggttatctgggtctatataatccagtcaccccaactgttcccctggaaatggagtgaggaggatttattagttgctgcctgaagaaaagggaaatgctccaaaaaatttggttgtttccagactcaaatagagcctgcctttcattgattctgttgcccttaaagcttcacggtgaagatgcagttgcttccaaaaggcttctttctggtgcctaagcctccttatacttgcttcagagccctttccgtgaaccagctgtgtattgctcttctcatcccaacacttgcaatggctgaataaaggaagtggggcctgccttacgctaatcctcgttcatatgtgtttcttaaagttatttttccttcactgatgaattccttttttttttttttttttttgagacagtctcgctctgtcgcccaggctggagtgcagtggcacgatctcagctcacaacaagctctgcctcccgggttcatgccactctcctgcctcagcctcctgagtagctgggactacaggcgcccgccaccactcccgtctaattttttgtatttttagtagagccggggtttcactgtgttagccaggatggtctcaatctcctgacctcgtgatccgcccacctcagcctcccaaagtgctgggattacaggcgtgagccactgcgcctggcctcactgatgaattcttttgctttttaaagaaactgttcatttattttcacagtctgcaaaagcctaagataaagatgccacactctgaaaggatcaacaagggcatcaccaagtaatgttttctgcaggataaacaagtcaggcattaaattggttaatcctgattactggcccctttctctagcctcccctctgtgtgagcagacccggaccacaggctttcttatttcctttcagcttcccttgagactgagcagagagagaaaattagctaaatcaggaatgcagggaatacagttgcagcctcttcttcagatggaggaatgcgttttggggggagggacattaaagggccagtcgctcatgttacagctctttttaacttcatgagtactaatgccctgaagaggttttaatgaatgccctcttgtgatcagttcctagggcaatcccaggttataaaaggactgcccctgcctgtgagggaactggcctggcttcagtgggccaggctgctttgttatctgttattggtttttccagctcctctttctacatttcaagggatctcaggccttacctaaggcaacagtacattagttttagagtgggagatgctcacagttttcagaagagttcagaaagtttcaaaacacacagcactgcagaagataacattatagcttctcaagaccccaggggatctgggactaaacagtgaaagattaattaggtagcggaagccactaaggcagtgagtcttagttagagaactttggtttagacaatggttctcaaaggggcagcaacaccaacaatacccggaaacttgttagaaatgcaaattcttaggccctatcctagactaatgaatcagaaattctcaggatggaggctgggtgtggtcgctcatgcctgtaattccagcactttgggaggccaaggcaggcagatcacttgaggtcatgagttcgagaccagcctggtcaacatggcgaaaccccatctctactaaagttacaaaaatgagctgggcgtggtggcaggtgcctgtaatcccagctactcgggaggctgaggcaggagaattgcttgaactcgggaggtggaggttgcagtgagctgagattgcaccactgcactccagcctgggtgacagagtgagactccatctcaaaaaaaaaaaaaataataaataaagaaagaaagacattctcaggaatgggacccggcagtctatgttttaacaagccttctatgtgataccaatgtactgtgaagttttaagaactggtctaaggtaaatattcctgaggttgtcttatatcattacagggtcagaatgcatgcaaggaagccatctgtttatggttcttgtgagaagcagggggcctttccccatgcccgagagataattgttaagagctcaagcttgggagtcagtgaccctttctgaattctacctctgccactcagtaattgtatgttcctgggaccattacttaactttcctgattctcagtttctttctctataaaatggggagaatagtggtgtctaccttatagggttcttggaagaattagatgagataatgcacacatattgcagaatctgaagaacaatcagggtttagtaaatagtagctatttttaaatgatttttccaggtatgagtctatcctacagcttcaaaatttagacccaggttgttctgagtattctctgtgggaagaatctgctatagagaagatttttttaaagtgcctgtctctttgtttccttaggggattgcttttgccctgatttgccacatctctttactctgtggaaaatggacagtttatgtgccctagttttatatggggatttatattcttaattgtctcaaggattcttacctgtctgacaaaaccaactccccatggaaagactccatggagactccatctctgatccttccccagaaagaaagcatgattcttaagttttttagaatctgtttaggagcactgtcaacatgaatttttctatttcatgagtgagtgcagcctcgggccttgttggagaatttagaaagcatgctgttccactaacctgttcaacctcaacttctgccgttgtcatagcaatgacagtcctgggaggtgtgtgcatatccttattaggaaaaaaaaatgagatcagggatctatgtgagtggggcagctcccgcctgtgagtatccttcgctgtcacctgccatctgacagcccaggagtgccagcttggcttggctttctctacccgaggaaagtaagtccttttaagatgcacttttactttctggggttgtgaaactcattgtgtttgccagagttctcttcgcagcttatgtaaagaatttgtttgttttggattgacctgaagggaggaagcaagggtgtgggaaggggaattagcatcccctacctaggagaagccatgaagcttacttaagtctctgctggctccatccattcatgactttcttcatcttcttcttgggaaaacactctgtaccttccacttttaatggtcatgtaaataaaagactagaatggagatgtcctggttttctgaaattaaacatttttgtttatgaatagactctaagataattctttccctagacgctctgtattttcttggacctctcatttgccccatagtaattattctaggattggtggcctgggcagaatacagtcatggttaagaccatgatacataatagaagaatttcttccgtaacagtagccccaaacagagatcacgtgtctcctgaaacctatccagtctcatgtgcactcagatgtacgatcctggatataacattttagagggtgtagtgaggagaatagaacaacactgttctcttaggctgcagtttccttcaagccccacgatggagagaagcaggctaatgcagggtaaggaaatagagacttattatagtttcttcagttatcattgattcctttaatatgccagctacattgaggcaatacagtctggcctctgaaaaccttgtcaggagaaacaacttttgaatatatcttagaaaaataagacactttatcccttcttttgtttaagagtgttgcataaaacaggagagtttctgaattaccctcccttctagctttctttatacaccattctttgtagctgaagttttaagccccttgtcaaaagggagattcaagtttctgctggggacatctcagtgtcacaaagggccaaggaagtagggtctcaccaactttgccacctgactcagctcaaaggtgataggtcacctgtgtgactgagagctttgtgggaaagatgatatggagggtggagagtctgcacttcactctgtgggaaaaattgctgaggttgtttagaattgttaggcttggaactcctcctgggaggtgcttgaacaagaaagacctgcttataacctgagttgagggcagaggaggaagatagtttgtaattcctttacgttttgtggctccggcaagccctgtcctcagcctcactgacacaagtaaactaaaaatgaaagtctgtcctagtgacagcaagggtctttcatggcaatattttaaaagaaactctgcccagatttcaaaggaacgtgaaaattttatcttcagaggcagtcagctttgcagttgaaaaggccattgcctaatctggagaaacatattcagttcaagcactggctagagactagaggcccccaggaaagggccataagattggtcactgccaggaagcctgtcaatgagtgtgtggactggagaggaatctttctctgcctcagcacttggagtctccgttattcacaatcagaaaaagagggagagcagagatagatgacattccacgtttttctcggtgagaccaagagcttcctcagcaacagccctgcctgaaattgtctatctccaagggcgtgggctaggcaaaggatgggagaagtcagtcctgaagatggtaatacttaaaggaaataagggggacaaaggatgcttgtgctactattgaaacaggaaattgagagctctgtagaagtcagactcaagaggcataataatagaaagttagggtatgaaaaggtgacttttaagaaccaaatgtggacccgaaagagaacaaagagaagtttattgtaactagcgttgtattccttgtctgctggataccaaacaatgtaccccgggtcttgagattatcgatgccattgtctgtaaaaaaccaaccaaacaaactttaaaaataagtaaagcctgccctgtacagaaaatctaataaagcaaatttgttggtgatgttccaagaaggttcaccagcttgggctttcaaccagcattgacccaatcttgtgtccagagctgttgctgtaggtggtatcatgtatcaagctgaatagtgaggtgacattccccaagtcttctctcttgtcttttttgactgtgcatcatagatactgtattacccaagaacacacacctgttcgatctcttttcctataatcacctggagtcagatgaataccgtaaaggtctgtggtaagactagaagcctcagccagtatgaatgatttacattagatgcacaccaagctgctttcggagagtccagatttatggggataagagcatcactaggtatatcaacagccctagggtggatacctttgagcctgtaaatttggctctgtgttggacgatgaaccatggaatacagaagaagctcccttctctcagctaaagcctattagcaaaaatagagccctgaggacattgtattttaagtgtatgttccagtgagtgggtcgttgctgggtcaagttttataagtctttaaatcccatactgttgcctcctggactgtagaaatagtctcttagaacaagagaaaggaagacaatagctaccatttattgagaactgtgataagcactttacatatgttgcatacttaactttgagagaagtacattattattcccatgtttcagataaaaaaattaaagctcataagaattaagtggctttcttacattcacacagctagtaaaaatgttttttgctcaccattgtattcccattgtcaagcaggatgcctagcacacaatgatgctcaataaattttgttaaattcattaataaatgcagtggtaaaggcagtatttgaactcatgtctgcttgctgctgaactctatacacttaacacattactattatcttgtcccgcatgatacatgaagggaatagcttggtaacttggaaaagactatttactgtctgagttctaggccaactgtagggtgtctgtatttatttcccattatgctataacaaattaaccataaacttcatggcttaaaacaacacaatgtattatcttacagttctggaagtcagaagtccacagtgagtttcactggctaaaatcaaggtgtgttcttgccactatataacaaggatccactttcctttagtttccaataacaggctccttatttctacctgagccctcactggcagcacctttaatgccatatttgtaataacaatctgttcatgacaatttaggtttgctcctcacttttttctgagtcctctctagtagagccattaatatgcatattgctactagcagcctgttcaaggtaatgtaggctctttctatcatgctcttcaaaattcttctagactctgcccatttcccaatctcaaggccacttccgcatttttaggcatttataacggcagaaccgcacttccagataccaaaatctgtattagtttcctagggctgccataacaaattaacacaaaatcccttttgccatgtaacataacatattcacaagttctaaaattagaatgcagtcattttggtggggccattattctgcctaccacccggtctttcatgttcaggcagaggtggctctgtgtgtgtgtgtgtgtgtgtgtgtgtgtgtgtgtgtaagttaatttcagtagagaatgagctagagtagagaaagagaattaaggtgagatgtgtcatggaagaacagtgactgatgatgctaactttgctcaatcaagaagtgtgatccatttaaatcatgctttcagtgatctatccaatcagataaactactctcccttcctgggaagagtaaggaaggaagtagagctaaagatgaaagttcttttcgtagcacatccctgcaaaggatgggagtattgttttggtgggcattcccttttctaagagcaaagatggaaatgtggagagaggagaaaaatggttcccattacattattgtgttctggacttagagatattgttctgccccaggtctaagaatattgttccaagagttgggagcaggcagcagaggacagtactctttagatcacccagaggccaatctgtaaggattcaatcctggggcatggtagctaatggaaaagtcactgtcacaagtgatgccaggagatggggcaacacatattgcctgccttgtatgcatctagcgtctgtgtctaagtgaaagcagattatatccagaacttccctggaaaatagaagaaagagcctgattggtgtgtatgtgtgtgttaggggttgaggggtgggtaatgttcctgccagtattcgtaaatcccacctgcttttcctgtgatgcttcctgtgttggggataggagggtgggatggttcagggtcaattttatggatccatatgtatctaaggatgtgtttgttttttgggaacattttgtataacaaccagtttcactctagctccctccttgatattctaaacaagctggatatctccaaagcttaggccctctccatacttacagcagctctgactggagattaaatcaccccttatactgctgacaatgattaggccatgggacccatgaaagagcctccccagagtccagcatcccctgtgggctccgtgtgtcatcaagatgtcaatccaactgctgttcctgcagtctgcaatcagcagggctatgtttattcagcggtcagtgtcacatcaatttccttctgttgcaacaagtataaatggattctaaatatttgcctttgggaaatttctttagagggaaactcactaaagctaatttttttagctttttggtatgttctctctgaatctggggatttagatatataaattagcttctttggtcttttcttgcccagggtcacaaccttgcctccaggataataccttctaagtgtttgtgatttgaagggcactacgaagatcctcacaaaaactacctcccagccgggtccctgaaactccatcattaaccaccttcatcagcatttctcttttaaaatccttattcattcctgttctccttctttctttctcacacacacacacacacacacacacacacacacacacacacacacacggggagagagagacagagagagagagagatagagaagtgaagtatatagtatcctttctagggatgcttttcttggcttggctccaatagagaattttgttgggaccctctatatatagtcgtgtaccaaataatgacactttggttaacaatggaccacatatgtgacagctgtcccataagattgtaataccatatttttactgtaccttttctatgtttagatacacaaatacttgccattatattacaattgcgcagtattttgtacagtaacatgctgtgcaggtttgtagcctaggagcaataggctataccatatagcctaggtatgtagtaggctatgccatctaggtttgtgtaagtacgctctatgatgtccatacaacaaaaatgcctagtgatgcatttctcagaacatatccccattgttaagtgatacatgactgtagtcatcatcaaacatttattaagcacttaggtcaggccaggctctgttctaggtgatgcagatataatattaaatataacacagtcctgcccttataaatctaatggtgaagggagaaatgtaaagaaatatgatggaaatattacattgtcatgtgataagggcgacaataatgccctacgtaggtagggtcaacgaaggggaaggaagctgggacaaaccaccagggcctgttggtccagaatgggacccagggtctgtctatgttataatcaattcaaaccctaggtaaataaggtaagctaggctgcctttcttgagacagtccccagattgttttcacagggcccaaacactctcagcaaccatgaacagtggatgttgtgggacctcagaagatggaattggaaattcaggggactaagtcagagattatttgacatttaatactggatattgaggccgggcgcagtggctcacacctgtgatcccagcactttgggaggctgaggcgggtggattgcctgaacccaggagtttgagaacagcctgggcaacatggcaaaaccccatctctacaaaaaaaatataaaaattagccgggtgtggtggcatgcacttgtagtctcagctacttgggaggctgaggcacgagagtcacttgaacctggaaggtggaggttgcagtgagctgagatcacactactgcactccagcctgggtgacagaatgagaccctgtctcaaaaaaaaatttaaaatactgggtattgcaggatggcaagtaggatgtggagaggaagagaattccaggcaaaggaaacaatgcgtgcatgcaaaaacaaaatacaaaaaactgaattgtgtagtctgggttaataagatgagtgcatttgatggatgtggtagaataaagagatgttaggaaatgagatcagaaatgtagactggaatcagattttgtaggaccttaaacatcctgctaaataatttgtagtttcatttgttggccatggagacccactagaaggttagttggtttgtttatatttaggaaagaagattcttttaagtttccttaactctactgaattttcaaaaatcaacctacagcaatccaaacttatctgtggagatacattccaagaccctcagtggatgcctgaaacctcatttagtactgacctttatatacattatgttctttcataggtgcacctatgataaagtttaatttataaattaggcacaatactcttgtgctttggggccagtattaagtaaaataagggtacttgaatacaagccctttgataccaaaacagccagtcggataccaagacactttctaagtgaactaacaggtgagtagtgtagacggcatggataggtcggacagagggatgattcacgtactgggcaggataaagcgggatggctcgagatttcatcacattactcagaacagcttgcaatttaaaacttatgaattgtttatttttgaaatttttcatttaatattttcagactaaggttgactgtgggtaactgaagcctcagaaatcaaacctcaaataaggggcgatcactgtactgaataatatgtcaagatgagctatgagcttttaacttagtgtttttcttctcccaaaccaaatattggaaactttggagtgtttagaaaaggagaatcgaaaagggaagtaaatgcagcattttttttaattgttaaataaagggctgggcttggaaatgttcttaggtaatcctggtggatttggtatatcatgtctgagaaaatgtggagagtgaagggcaggtttaaaatttgtctcatgttagtttctgaagggagatagcctggcattgcacagtgcctcacatttctatcgtatcacttaataattgtgcaacctgtgcttcagatttatcaatgtataaaagaggagagaccataggctgttgtaagtattaaatgacataatgcacgcaaaatgcttagaaccatgcttagttcatggtagccactcaaaaatgtcgtcagaactattactactcagtttaatgctcctagcacttaacacagtgcttggcacacagtaaagaggattcaagatgtttttgctagattacatggaatggtatggaagtgtgcagggtggtgtagagggttctcccattatcttgccttccttatactgcaatgtgctgacagcacctccattttataccctcaatgcaaggatatcactacttgtctagaaatggttgctcaaggctgagaagtgacagcaacacagagcctgggattgctgccaaatttcaagaagcacagattgtaacaaagtaaggggggagggtagagaagaaaagtttgaaaacccaaccaaagtcagaagccattttgttgtcggctgaaataatgcctcatagagtttcaggtggggcaggcagtgtgaaaactttgggaatagtcagtgtcaagttgtggtgctaagggaggaacccagtagtgctcaggcctgggcaagtctggcttcttggggcccagcatttagaaaggccctgtgtgttttgatattatgctgtcactatcttgaagttcttgataatttgttaacaagggccgcctccccccattttcatttggcaaatttcactggttcctgcaaattatgtagttaatcctgggtgcaggctagtttttgaaccatgttgggctagtattcttctgaacctctatctctttgatttaattacagaagaaacaaaagtcataacaaattatatctgtgcaggactaaaataaaatgagtagtgcctcactccctacatccaatcatgctttccaaaagtaaccactaccaataatttagcgtgcatcttcagaattctttatatgcctacattttaatgtatttttaaataaaatagaattacattgttgaagtaaatattaaaaaatatagcatttttgcatagaaatatttatttccctcaatcccactcccctttggtgaagcaaccactgttaacaattttgtgtgtatcctccaatatttttttgaaattaatgaactttactttttagagcagttttaggttcacaggaaagttgagtagaaagtgcagagttctcatgcactcctgctctcccacatacacaatgcccccacacccccgccacagtgacatcctgcccagagtggtacattcatgacaattgatgaaactatattgacatcattattgaaactatcattaccacccaacttccatgtttactttagggttcactcttccaaatatttcttgcatcacttaacaatggggatacactgagaaatgtgtctttaggcagttttttcgttgtacaaatatcatagaatgtacttacataaacctagatgatatagcatactacacacttaggctctatcgtatggcctatttctcctaggctacaaacctgtatatcatgttactatactgaatactgtaggcaatttttacacaatgataagtatttgtgtatctcaacatacctaaacgcagaaaaagtacaataaaaatacattattataatcttacaggacaactgtcatatgtgtggtccgttgttgactgaaacatgattatggggcgcatgactatatagagattttcaaaaagcaaaatgggataatgcaatatgtattattatacagcttgtgtgtgtgtgtgtgtgtgtgtgtgtgtatgttaacaaacacctttctacgtcagtacatatagatttgccacaatcttcttgagtaaggatatagcactatgttgtatacctatattataatttatccaatttgctgttggtatctatgttttctaaacaatacaatatacattcttatacatatttcttatgcatgcttgctagtatttatacaggataaatttcaagaagtagaattacagaatcataggatataaaaatatcaaattggcaaattggcattcacgtacctgtggttggactgcacttgttacatacttccctctgagccttccatccccacctcgagctagtgctatatgtcacttaactcagtgacatcatcatcaacagacttagcctctgcagttgaaaatgctagagcaaacagaggagaaaatttacttgtgaatcataatagctaacctgtactgaacagttaagccatgtgccaagtattattctaagcactttacaagtattaactcctttaatctgtataaccacacccagaaatttgtgcattattatactcattttactgctaagaaaactgacacccataggattaaatcagatcacacatttagtaagggcaccaggatctgaagcaggattgtttgacttctgagtctgtgctcttaaccactgcacacaccgtctctagaaagtttaatgccatctttatgccaaagtttatctacctggtttatcctttaacactattattgtatttattcatttacttgtcttttcctcccactgtgctgtaactctttgagaacagggtacttgtcctaatattattcatatttatatccctaattcctaatttaatgtctaatttattgtaaataagttttttttttttgagacagagttttgctcttgttgcccaggctggagtgcaatggcacaatctcagctcactgcaacctctgcctcctgggttcaagtgattctcctgcctcagcctcccaagtagctgggattacaagcttgcaccaccacgctaggctaattttgtatttttagaagagacacagtttcactatgttggtcaggctggtctggaacccctgacctcaggtgatctgcctgccttggcctcccaaagtgctggattactggtgtgagccacatgcctggccttgtaaataataagtttagttgaataaataacaatgcctccgggaggtagctattatatccattttacagatgaagaaactgtaagtcaatgttaatcaaatagtatcctagaaaatagtagaaagcagaatgctggagctgagatttgaacccaagacttttgatacttcgtccagtgtgctttccaccatgcctaagtagtctccttcacttcctccttcagagggctatggagagtaacctagcaaccatttctaagctggaaaatgtcacagccggaagtcttcagtcccctagaaggaaaagagcctgatggggagagggtccttggaaaagagaatttctggaagtactacatttgagaataggtggttaaagtgggagttggattagtaaaggaatactgcatagtagtaatacccattctttatttcagaatttcttcatgacagacattgatctgtgtgatttataagccttgtctctttttaatgttcacaatcccattagatggttattgttatctttgttttgcatatgaaagaatgggagctaagaggccaagtaccttgcctcttattcgttcaacgaataagtggtgaagcagattccaactcaagtctatgttacccaagaacctacattttaagcattttgttaccccctggatatgacagccaatgaagagggggtattttgagaagagactataaagggaaattgccttccctacatcctgggggaccttatcaaccaggaaacaaggtagagaaaactgtgcagcctgagccctgctgggttgcggggggctcacagaaagaagaaatgtgatttttttttagctaactacggagaccagccattccaatgtttgaatctgggttcgcagcacatgatgtctttatactcttaacctagaaatggcagagttattttgggcacaaagcaagagctgtggctttaaaaatatgccaagtgtatttatctcttccgctccaagattactgaaaattagcccagctgtagcttgggacaccaaacagccaaaaaatcttcttccagctcaactcattccacccaaagagggtgaaatacccaggagtagcagctctagcggcctctgggtagtggtattagattggcctccccattgctaagcctgacatccaatcacacacacaccactctcccagctgctctgtagatcacaatgctaggcctgtgaatggagctcaactccgtctcttccctcatccccaaggcttcacaagaagtaaacaaaacaaacaaaaactatttgattattgagccaaggagtcaatgtgagaatagtttttcaccttcattatcaaatgcctgtgtggagctgaatgtggtggctgacacctgtgatcctagcactttggggaggcagaggtgggaatattgcttgaggccaggagttcaagaccagcttgggcaacacagcaaggccctatctctctctctgtctctctctgtctctctctctctctctctctctctctctctctctatatatatatatatatatatatatatttttttttttttttttttttttgagacagagttttgctcttgttgcccaagctggagtgcaatggtaagatctcggctcactgcaacctccttctccagggttcaagtgattctcatgcctcaaactcccgagtagctgggattacaggtgcctgccaccatgcccagctaatttttgtatttttagtagagacagggtttcaccatgttgggcaggctggtctcgaactcctgacctcaggtgatccacctgcctctgcctcccaaagtgctgggattacaggcatgagccactgtgcctggcccctatctctgtatattaaaaaaaaaaaatcttagccaggcatagtggcgcacacctgtattcctagctactcagaaggctgaggtgggaggatcacttgagtccaggagatccagtctggcagtcagccatgacctcaccattgtactccaacctgggcaacagatatagacgctgtctctaaaaaaaaaaatcctgtgtgatttaggacaaattatcttgctgtaatttaagccttcatattccttttttataaaataaatatgctttaaatatgtatttagatatacacttataataatagctttaattaattgtaattaaatcatttaaaattaaatacatgcaaaataccccataaactgtctaatccataataagcaatcaatagtccttaaacaaatgaatcttctgttgctctgatcttaataagtaaaatttaacgagtttttactttgcaccatgcacttatgctatgtgctgtataaggatagttacatttaatctataaatcaaccctatggggcgggcactcttatgaactttttttacggatgaaaactgaggcccagagatatgaaataatttgccaaacatcaccataatttacatgatgtagccaggtttaagcctactattctgattacagagcctaagatcctacagagaacagggagtatatttttacattcccttgtttccatggaaaagtctttccactgtcaattgaaggactaagcagcagcggggaagtgctggaaatgctagcccaggtgggcttagctttctccctctctctctgatcctggacaggatttgggtttcagaccacgattctcctgtgttttgtgggctgtgattactcagattaggtttgcccaattcataaaggactggcgggggttgggggtgaaggtgtgggagaaggcggagcttgtccagtcggtccaacaaaccccacagatggcgaaatagggggcggggaaggagcttgagatattttacaacctgggctgtttcagtggttgatggcggatggtttttgccttttggtcagcctgagtatatactatcattctacaatcggccaaattctgacagagagggagacagagagagaggttgattaaattgatgcccaaaaccaagaaggagcaaagaaatcggggctgtttgaaaaagactgcagtggctgacttgggtggtgagcggaaataaggaggagggagaggcggggtgtctctgcgcggaaagcctggaagttcacttgcaaacacagaatctgcacagccttcggtgccctgactctttcctgggcatccagaggcagcagcagccgccagcgccaaagaacgagcagtccaggggctgggccggaaacggctataatcatttaatagcctttgccggctgcactgacttagcagagtgggcggtaggcaggctccagagtgctgtctggcaagatagtccccggctttaatcaaaatgatgggttttctggaagctctttattaacctcagcactgaaatcccagagctggtaacaaagggatgaatggggagcaaaggggcggggccgaaacctggaggccgggctgcatccgcaccccttcccccacctccactcctttcaactcattctggcttagggctcctgctggcatctctgtgcctcccaaatagtagtaacaaaacaggcaataaccataataattggcacatttgtataacgctttagcattttcaaaggatgaccttgttatacagctcaggatctgagtctcctagctggagtcagactccctagatttgagtcccaggatccaccagttagtgaccatgtgaccattagtccttagtcccctcatctataaaacagacacataacacagacagagatactagaaatgtctacttcatagggctcttgtcaggaccaaaacctatacgacgtgcagatttgtttaactctgttgcacacacataggaagggcacagtaaatgttaactacatcgacaaccctgtgatgtagacaggaaggggatcatctccattttatggatgaggaaactgaggctcagagatatttatgtaaatggcccaggactatgcactagtgagagaaccagggcaagtcctcaagaacagaaagagaacaaagcaagatgaagagaagatcagaaaagtgaacaccctccaacaccctccagcacatgcccctctgagagctttcctgaaaatagtatccttggtcaaaatgagtttatgttctattagggaaagtcagtgtaaatcagaaaagccctcctggccttaacagaacagttccaaatgcagatgagggtgagtttaacaggcctggcatttgcttcacaatcttctggccctttcctggcatttgccttggcaaagactctgacctgatcaatcctagtccctgaggctcaactccatcaactcaggcagccagggttagtttagcatgaaagaggaaagctggaaattttgccaaaaagattcctgggcagtgcctaagggaagtgcccaaattggattataggattacatgaagtggccagctacttccagagggcagggttttttgtttgtttgctctgtcacccaggctggagtgcagtggtgcaatctcagctcactgaaacctccgcctcccgggttcgagtgattcttatgcctcagcctcccaagtagatgaaattacaggcgtgcaccaccacagtctcgctaatttttatagttttagtagagatggggtttcaccatgttccctaggctggtcttgaactcctggcttcaagtgatccacctgcctcagactcccaaagtgctgggattttagatgtgagccaccattcccggccccagagggcagtttttaaagtagaagtgaagatctgtatgcatttattaaaatatatgttgttctgattttaaaatatatccctaccaattgtgaagatatcggctaatccaataaaaaagcaaaaccatattttgtataattatggtcgtattctgttaaataaacttttaaatcctattgggttgtaatctgtagtctgggaagggctctgcctaacgattcagacccctaccagatttatatgtgtctgaaatcctccttctagcctcttaacaggcccattcatttgggtcttgactgcatcctcagtcttgtctttgcctgagggtgagctaggaccctgggagcataagggaggggacttgccggagatcctagaagggaaaggaggcagcactgaaagaagaaacatttccttgattgatcatttgctgatactggcccctggttggggttaggggtagaaatgtgcttcttccgttttcatcttcttcaaaagggagtatctccatgattctgccccaaaggcatgacattttataggcaaagccagccaagtgtcttgagtgctcttaaccaaaaggaattcagattaggaggtcagtcagtgtttgtcagatccttaagcttttgttttactggaatgagtcacagtctacatgctgctgagctctcagagatgtttgttttatacaacaaccagaacaggtgaggcacagtggtctgtgagggactggagagaccacaccttgttctgctctgcggaagctggacatgtggaggaggcacctgactagatctctgcctcctggagtttaggctgagtcatatagaaccaggaagctcagtgacatgttaaagtggattaactcttggcagtcctgctgtgaggggctccctctgccaatacacacagccattaatgtcctttaactgtgcaagatgaacatatctctgtgttctgcatctccagatgacagtgcttaggcctcatgcagagtcctggttatggttgaagaaaaatttccattttgggctctgagggcaactaaaggactgtggagtggtgctgaaacccagttttaggtgccgaatcagaggtttttaaatacatttctctcttttgtctcagtctcttagagacaggacctgtattttaaaggtaaacaggcagattctggctgagctcaattgcagatttgattaacttagatagatcaaagtcattagtctcagagaaaaaatttgtttctcatccctaaagtgctattgtgtcagctctgccagggtgtaaggaaaagggtttggaagagagaagaaaatttcttaccctctctcgtcactgcctgctgtaaatttgcagtatcattatcttggtctcctaagccctgagagctgcattatatataattgcccatatgtgataccatttactgaattcttgcattgtgctaaggatcaagcttagtactttacatgcattacatcattgtctttagggaccccaaaagtgcctcattggagagttgtttggtctgctaaagagtgggtaccactttcacttctcacatcagtcctttcattcattcatccagcaagtatttactaaacacctgttatgggccaggaattgtgctaggcactggtgatacattggtgaataaacagatacattttttgcctttgtgaatcttacagtggtagagaataataggccaagggggtgctgcttggctaggaatgtcatagaatgcctttccaaggaggttacatttaatacagacttgaagagtgaggagtcatgctaagaatggatgagaggctcacgcctgtaatcccagcactttgggaggccgagacgggcggatcatgaggtcaggagatcgagaccatcctggctaacacggtgaaaccccgtctctactaaaaatacaaaaattagccgggcatggtggcgcgtgcctgtagtcccagctacacaggaggctgaggcaggagaatggcgtgaacccgggaggcggagcttgcagtgagtcgagatcgcgccactgcactccagcctgggcgacagagcgaaactccgtctcaaaaaaaaaaaaaaaaaaaaaaaaaaaaaagaatggatgagaaatcattcaagacaaaagcaaaccagatgtgtaaagatcctgaggcaaaaacaactccaaggagccaggtatggtggcctgtagtcccagccacttgggaggctgagacaggagggtcgattgagtccaggagtttgaggttacatcaagcaatgattgcaccactgcacttcagcctggttgacagagtgagaacctatctctaacaaacaacaataaaaaaacaattccaaagagtgtttgaggatctgaaagaaggcctgtatggttggagtataatagtaagagggagatttgtagatgagagtggagaagaaataaaaatcagattattgaagggacttatgtatcatggtaaggagttttttttttttttctcaaggcagtagaaagcttaagcagaggagtgatataatctgatttatatttttaaaagagtttgctatatgtatgttatgcctcatttttttttaaattttttatttttagatggagtcttgctctgttgcccaggctggactgcagtggcacgatctcagctcactgcaagctccacttcccgggttcatgccattctcctgcctcagcctcctgagtagctgggactataggcgcccaccaccacgcccggctaagttttttctattttttagtagagacgcggtttcactgtgttagccaggatggtctcaatctcctgacctcgagatctgcctgtctcggcctcccaaagtgctgggattacatgtgtgagccaccgcgcctggctgttatacatcagtttttaaagagagacattaagaaataaagatgactctggctactgtgtggagggttggagagaagcaaaagtggaagcagactgaataaggagactattgctgcaattcatataagagatgatggtgtcctgaaagagtggtggcagtgaaaattgggagaagaggacagagtcaagatatatttaggaggcagaaatgacaggtcttgatgatgtattataaatggagaatgaagaatagaatagagaaaaatgaataattagctttgaactttctggcttgagaaatggggtaaatggggtgtaatttactgaaactggaaagatttagaaaggaatagattcgaggaatcaagagtttgatttcagatttcttcagtttgggatgcccatgagatttccaactggggataccagataggcagttatacatgagattggagcacagagagatgtgggcttaaaatataagtctgcatctcatcagcttattcatatggtatttatatctatggatatggctgagatcccaaaaggagagagtgaagagaaaatagagaagagagtctagggccaaacccaaggaagcttcaacacacagatgaggagactgacaaaggaaactgtcaaagaacagtcagagagaaaggtcaggagaatgttttgatggtgggggccagaatatgctgtcccaaaataagaaggattgttgagctgaaggcaagttaaaagaagcagatacaggctgggtgcagtgggctcatgcctgtaatcttagcattttgggaggctaaagtggacagattgcctgagctcaggagttcgagaccagcctgggcaacatgatggaacaccatctctactaaaatacaaaaaaaaaaaaaaaaaaaaaaattagccaggcatggtggcatgtgcctgtagtcccagctactcaggaggctgaggcacgagaattacttggacctaggaggcagagactgcagtgagctgatatctcgccactgcactccagcttgggcaacagagcaaggctctatctcaaatttaaaaaataataatcatgataataataaaagaagcagatataggagaggtcttctgccctccctgtatttgcctaaaaaaccataaatttacaaagacaaaagttatcctacttccacctccctcctctgcctcccaccaccagggagaacaaaggttaaccactgaagataactttggactcttattggcctggaaatggtactgctttacaaattagcctttatctgccattcatttgccttcccccaagtagctacccattagagactcaaagtccttaaaggtcttttcctttgtcttacacttctttaaaaatttattgttctttgttgaagatgctatataagctggaattctaagccacctttttgagaactgctcattctctgggtgtctgtcatgtatatatgaaatgtacatgttaataaacttctgtttccttttttttcttgttaatctgccttttgtaacaggggtccagtccatctaagaacttattggggttattctacatgacaaagaactcatgagaataagtgtttcaagaaggggatgacaaatgctgctgagaggtttgataagatgaggactaaaatgtgaccattgattgtggaagtaatataatgaacttgacatgagttatgttagaaaattactgctcagggacaccaaattagaggagactgagaagtaataggaaattgaaatagcagttgtacccaaccctaaactgtaattgaacataaacagtttatttgatggagcttttcacgtgtcaaccaaaggagcagtgttagatacataaacattgctatgatgtcagagttccaatgtcatggccactgggatcactttgcccagacagaccattacccttcctctccagctctgacttctactcttctagaagtcactggtatactttatggtgtgtcttccaatcagactcttgggaatgtcttttattgaaaactcctgtggatgcataatcattttcccaagactcagggcagatttcacctcctctggaaccccattaactttctcaagtataattaacaatttcttcttctggagtcccacaatactttacatatactttagttattgcatgtattaagttggtttctagttgcttgagtgtatgtccaactagactgtgagcacactgagggaaggaatttggcttggaaagtaaaattggctcccagtgttttatctaaacaaataggctcaatttacaacaggattccatcctcttacgctgtgtattcccatctcttccatgctgcatcccaccacccttcaatgttattacaataaaattaagatcaaataatttattcagctaatttttcttgttttggacaaaatagacatcctaatacatttatagccaaagtttaatctagacactaaaaggagcatattttgcctttaggctctgtatttcccatcccgttcccagtcaagataatcacaactgtattctttaggaaattcttcacaaagaaccaaacatatgttactatgaaactagattcttggtatcctggtgaaaaaacctgccctcttgcttgtctgtaaatactggccttggctgggtgtggtagctcatgtctatgattccaacactttgggaggccaaggtgggaggatctcttgagcttcagtgtttgagaccagcctgggcaacatagtgagatcccatttctataaaattttttttaaaaagctagcctggcatgggagcttgtgcctgtagttccagctacttgggaggctaagatgggaggattgattgagcacaggaggtcgaggctgcagtgactgcatttcagcctgggtgacagagggaaatcctgtctcaaaaaaattaaacaaataaataaataagtaaacacttgccttgccctcagacttgaacaaacaactcgtgatttttctggggaggttcagcctgcctatgcagtactcctgtactctaccagcagtgtggcatcaagagcatgtgttgaccctgttaatgatttgtaatgttttgtctttcagaaccagaggcaggagaagtgtcccctccagtcggtgcgggtgtcaacagcaacagctggacctttaaatacggaccaggcaaccccaaacaatccggtcccggtgagttgcccgacaaattcattatcccaggatctcctgcaatcatctccatccggcaggagcctactaacagccaaattgacaaaagtgacttcataaccttcggcaaaaaggaggagaccaagaaaaagaagaaaaagaagaagggtaacaagacccaggagaaaaaagagaaagggaacagcacgactgacaacagtgaccagtgaggtcctcaaatggaaacaagccacttagccagtttttgtaataatggcaaatctctcccatgtagcaattccctgctcctttttcctatctacatgagccctcttagagacctcagaaatctgcagaaagttccctgtgtctgtctagaacgcatttaacaggttttgtcgtaaaagctttactaagtctggtgttaactctttctctccactctggcttgttttcagaacctaaaaagcagacccaagtttcctttctcctccgccgcaaaggagaggcttcccagccccgccagtgagaggttggactctctgccctgtgctccggggatcctgtcttgatgacacttgcagggcaggctgaaaagttttgagattgagcagcttgggagtttgtggccactgggtatgtgtggctaccgcgggtatgcgagtgccagatattggctgagacgagccagcttagactaattggtacaaggaaggcaagaaaacaaagacaaataaacagcggaagttatcagtatggaggggaagtgtaaacttaaagggaccagactttctaaatcttacaactcaagaggtggcagccaccctctaggagacaaaactacccccactgacaaggctttaggagaccctaaagtctgttggctgtgacgtcattatacctaaaatctgcatcatacctgcaagccaacagttcagtgttttaacagagaaccaccctgggaaacagaagcagatctgatgtgtttcctatacatgtcctgtgctcactttattaaaaattcttttgcacacaatgtttatgaaaaggccagatccttttccaatacttatgcaaaagcaaaagaaaaccccgacacctcacctttcgctgtttgttgtttcatagatttatttaaaaaaagagaaagtctatagctataaatctttaaagagaaatatgaatacaattcccctaaactctcctcaaaagagaattcagtctacagccatttaaatgatcattgctgctacagaagtgctttaagagaattgcctgaaacatctgtattatatcggccacctgccaatcacagctttactctttcaggtcactctggggctgcctcttgcatgtattactaaataaaatgatctctctttctctctctctctctcttttctaagaaacaattatgtgcactttgatacacaaccttctctaaccaactatatatcaagacccaaaaattgaagaaaaatattgttttctcatacagtgagcagatttttcaatctactaattctgtgacttgtcttggtgtgctagcctacaccttctctttggtttagttttccttttctataacactctgaattgctaatcttactaacacctatgatgttacctgaaatcaatctcccatatgtatgctgtatgctatgctaagactcctgaaatatacttactctgtgcttgtgtatgtgaatgttaatgcaactattacctagagtgaactttaagctttattgttgaatgtaattccattatatttccttttgtacacctgtgaaaaagtggagtagtgtttttttaaccattgttaatcagcttttgtgtatgaaagacacagtaaaatttctttcttaaatcaagatactggtgattcaaggaattttatttatggtccagccaagagccatctcgtgccaagacttctgctggcaagggaatggataaagctgttttgttctagtaacaattttggaatgaatactgacaatattccatgagggtgtgcaagcacaaattttaccaatctgacctctttgaagttgcagaatgctttgaaattctaatggtatctgaaatatcagctcatagaaagtaacaaaatttgctgtcaccttaaataagacattttaattttgttataatgtacaatttagaagtttgattaattatattatctatttaggcattaatataaaagaggtaggagtctgttatttaaaaaaagcattaaatttaaaaaaaaactgtcttgtctacttttagcttcattctcccatattttgaagggtgtgtaacttcagctctgcaggattgcatggggtaaaacttgttaccaacacatgtgaaccattgctacattgtaggttgtgatcattttgccccactgaagcccatgtatctgaccttacgtgccttttgaactaggagaatcgggctaatttattaatgatgataattataatgtatctgtacagcactttttacatttgcgaagtgctttccaatccatgttagttactagttattacagctgtaaggataaaacacgtcatgtggattcattttgaattggtgctattggtatttcctctgttattgctaataaatgaaaatggtggtatgaaagaaatggtggtcatttctaagaataggaggaaatagaacactgataagcaattaatactgaagaagattgctgcagtatgaaactcactgtaacactctcttatcacgttagcttttatgtccattactaaggcaaaagccccagtggaatcaagattcaaacttcatatcattagaatgggcagccaggaggttgctgcgtcactttgtagttacactatttcagttttctctaataagaattgcaacaaacccatttttatcacaagagcccttctaggcatctttttcattacttgtttagcccttgcacctctctacaattggaaagccaagtgacaccccaaagaaatgaacttttaggtcagggatagtggctcttgcctgtaatctcagaactttggaaggccaaggccagaggatggcttgaggccaggagttcaagatcagcctgggcagcatagcgagatcccatctgtacaaaaagaaataacttttattgagtacagggtgtatgccagccacactactgcataggttcagctgtgacaaatagattgttttgtccttttgtagttaaatttgtataaatataagctttagatgctgtaggttctcagttaggagcaattttgccctcctggggacatttggcaacgtctgaagtcattgttgcttttcattacttgaagtggagggtgctattggcatctactgggtagggggcaacgatgctgtgaaacacctggcaatgcacaggacagccccctataacaaaggatcttacagcccaacatgtcaatgtctcaaatcaagattgagaaaccttgagatagagtgaccatataatttgtgtagtccacttttgaaatggaacaggagacaccattcgttattacttcaggattcaagatgtaaactgggactgtcccaggctaactgggatttatagggactctataaataaactggtatagctgtgccactaactagatggggaatttgaggcaaaccactacttctctcagtttttcagtcatctctaaactggtcataattataatacagaccttatagatttgtgaggtaatcttaaaaggttttagcaggtctggcacaccatagtactcaataaatattattatttattaatccttttcttccatttccttacccccttttcagagatttagctattagacccagggaacttttcctactgactaaaatgtgaatgagggatggccaaaaaaatcaacatagtcttggcaataaaaatattttatttactcctccgctcttttgctcaccccaggaggaaaagaaataaagtcagtttcataactccttacctatttctatcataataataatcaaatccctaagtagtcaagtggccagtctgtttgcagctatttcacctcaattattggtgatctgaaagccagaaaccaaagggtttgaagtacaacagcttgagagagaaagagaagagtc

SEQ ID NO: 436 - DNA, 220485 bp, Homo sapiens
  source 1..220485: mol_type = genomic DNA
tttttgcttaaatcggttaacttgggatttactgttagagtatgattaacataaatacacatttccatagatggtacaaatgagtatcttaagatactgtacatgagggaaaaaaattgttattggaaaaaaagctagcttttcttaacaagagctttgcttttctcttacggacattgcaaattttgcaattaattttacttctctctttgctctaggaagctgaaaacaaaattggtgacatggttagagtaactgaaggtgaccctttattatggattttgtatgctatcccactccttgattcattttatttcatcctcatcttatctttattctattttcatttttttactgtgaagggatcagctaaaaattaacaaaagaagatattctcaagtaattaacacaaaaaaagagatcgattgtattgttcttgcataaaagtctaaatgtaatggaaaaggaatattctaaagtaatagtacattatccaaatgagaaacaaataaattattaatttcaaaacatttgcaaacaattcaaaaatcaaaattaaatcacaaaacaacagtatatatacacatatattttcaatggactaaaatacctttgattactatgttcttcatttgaagaaatagtgaaaaatgctaatatatccaaaagaattgaaagcagggtctcaaagaaatatatgcacacccatgttcatggcagcactgttcacaacagtcaagaaatggaagcaactcaaatgtccacgaatacttgaatgaataaacaaaacgtggtgtatacatatgttggactattattcagccttaaaaaggaaagaagtcctgtcacatgttacaatatggatgaaccttgaggaaccatccacggatgcttgaatgaataaacaaaacgtggtgtatacatacgatggactagtattcagccttaaaaaggaaataaatcttgtcacatgctacaacatggatgaaccttgaggacattgtgctaagtgaaataggccagtcacaaaaagacaaatactttacgagtccacttacacgaaatatctaaagtagtgaaattcatagaaatagaaaataggactgtggttaccagagactggagtgacggtgaaaagcggagttgttgtctaatgggtatagagtttctgttttccaagatgaaaaatttgtaacaatgtgaatatacttaacattactgaaatgtacatttaatcatagttaatatggtaattttaaatattatgttgtgtgttttttaaccagagtaaaaaagggtaaaaaggtaatatattttagggcttaaaatagttatttttttccaagatgaaagctatgagtaaacttaaaccagaaaatcgactagttttaaatctacagaataaacagtagagccttccttttagccacatgatgtcgctgtccaccatagagtgttctctaggaaggaaaatacccagagcccctttgttacttcagagaagcggaggaataagagaagcagcaggactttaacagagactagaatatttaaatttttgcaaaacatgctcttctaatttgatcaaaacattgaggattggtaatggcgtcttctatcagaaggggccgaggggcctggacacggctgctctcgcttctgctcctcgcagcctgggaggtggggagcggccagctccgctactccgtccccgaggaggccaaacacggcaccttcgtgggccgcatcgcgcaggacctggggctggagctggaggagctggtgccgcgcctgttccgggtggcgtccaaaagacacggggaccttctggaggtaaatctgcagaatggcattttgtttgtgaattctcggatcgaccgggaggagctgtgcgggcggagcgcggaatgtagcatccacgtggaggtgatcgtggacaggccgctgcaggttttccatgtggaagtggaggtgaaggacattaacgacaacccgccaatatttccaatgacagtaaagactatccggtttcccgaatcaaggctgcttgattctcggtttcctctagagggagcatctgatgcagatataggagtaaatgctcttctctcctacaagctcagctccagtgagtttttcttcctagatatacaggcaaatgatgaactaagcgaatctttgtctctcgtgctggggaaatcgctggacagagaggaaactgctgaggttaatttgttactggtggctactgatgggggcaaacctgagctcacgggcaccgttcaaatacttattaaggtattagatgtaaatgacaatgaaccaacttttgcccaatcagtttacaaagtaaaattgttagagaatacggcaaatgggaccttagtggttaagttaaacgcttctgatgcagatgaaggaccgaacagcgagattgtgtattcactcggtagtgatgtgtcctccactatacagactaagtttaccatagatcccatctcaggggaaatcagaactaagggaaaattagattatgaagaagcaaagtcctacgagattcaggtcactgcaactgacaaaggaaccccttcaatgtcaggacattgtaaaatttcattaaaacttgtggacatcaatgataacacaccagaagtctcaataacgtctctctcacttcccatctcagagaacgcttccctgggcactgtcattgctctcatcacggtgtcggatcgcgactctggtacgaatggacatgtcacctgctccctgacgccccacgtccctttcaagctggtgtccaccttcaagaattactactcgttggtgctggacagcgccctggaccgcgagagcgtgtcagcctatgagctggtggtgaccgcacgggacgggggctcgccttcactgtgggccaccaccagcgtgtccatcgaggtggccgacgtgaacgacaacgcgccggcgttcgcacagcctgagtacacagtattcgtgaaggagaacaacccgccgggctgccacatcttcacggtgtcagcgtgggatgcggacgcgcaggagaacgcgctggtgtcctactcgctggtggagcggcgggtgggcgagcgcgcgttgtcgagctacgtttcggtgcacgcggagagcggcaaggtgtacgcgctgcagccgctggaccacgaggaagtggagctgctgcagttccaggtgagcgcgcgggatgcgggcgtgccgcctctgggcagcaacgtgacgctgcaggtgttcgtgctggacgagaacgacaacgcgccggcactgttggcgcctagggctggcaccgctgctggcgcagtgagtgagctggtgccgtggtcggtgggtgcagggcacgtggtggcgaaggtgcgcgcagtggacgctgactcaggctacaacgcgtggctttcgtacgagcttcagctgggtactggcagcgctcgcatcccgttccgcgtggggctatacacgggtgagatcagcacgacacgtgccctagacgaggctgactcccctcgacaccgcctactcgtgctggtgaaggaccacggcgaaccagcgttgacagccacggccaccgtgttagtgtcgttggtggaaagtggccaggcacccaaggcctcgtcgcgggcgtgggtgggcgccgcgggctcagaggctacgctggtggatgtcaacgtgtacctgatcatcgccatctgcgcggtatccagcctgttggtgctcacggtgctgctgtacactgcgctgcggtgctcggtgccacccaccgagggtgcgcgcgcgccaggaaagcccacgctggtgtgctccagcgccgtggggagctggtcttactcgcagcagaggcggcagagggtgtgctctggggaggacccccccaagacggacctcatggccttcagccctagcttatctcaaggtccagactccgcagaagagaaacagctctcagaatcagaatacgtaggaaaggtgagtcttttactttttcttgccaattctaaaattgttctttttaaaaaattctatatgatttctactagttatttagattcatagttcttcatttattttatatcatcctaccgtgcgattttgaatatgaattagagatcaatttattgcatttactgaacaatttatttaaacaatctacataactgttttcttatttttacattttggcacttccatcattaagtcataagtaatagaccatgaaacactgaaaaacacctcagcaaaatttgtaaattaaacatttcccataaatattttctctcttaaaaattgaaaatcacaatcggaagaaattaaagaatttgattatataatacgtattttcaactgacactgtctatccaatctgtcggatagtgtttggaataacctatatcctggacatttcttagattgttctttggatcaacaatgcccttgtctatgcaatagttaataagctacattttttttttgtttgtttgtttttgttgagacagtcttgctctgtcacctaggctggagtgcagtggtgtgatctcagctcactataacctctgccacccgggttcaagtgattgtcttgcctcagcctccttagtaactgggattacaggcgcccaccaccacgcccggctattttcttttttaaattttttatttttagtagagacggggttggtctcaactaaatgttggccaggctggtctcaaactcctggcctcaagtgatccaccctcctaggcctcccaaagtgctgggattacaggagtgagccactgcacctggtctttttatttgtatttgaaagcagcctgagtggatattttaacaccagaatttccaaaagtatgtagcacaggttgttacaacaaaatgacagcacttaggaataactgctaatcttaagtatgttttttataagtaaaataacccattatttggtataaagatttcacactgataacatttttgagttatcaggcaaaaatagagagtattgagaaaagagaccctctcaattttgtttaatttgaaaatattaacatttaaaaatcacactggggtttttcaggtggtgggactttttcttcatttaagtggagactacccagtctttatgttaatggttgataaatcatcctttcagtatcattatcattaggccaatgtgtgcaggcctcccactgcagagattgactacttttttctggcatctaattctatgcgtgggaatacattttccattaatgtgagctcactcaattttacctggaagcatccatattcctaatgaaattggaatttttccaaaagatgaggcctggtcttggatgactacattttcacttgaaacatttattttgggtaattataacactgaactcgacaagtaaatgttacacttggaaagaacttttttagcttttccaaccaaaggcagatgtattgcaataaaataactgtcttaaacggtcctctactatttagttcttagttatttgctgtttattctaaatatatgtgcatattgataaatcatagaaataacttccactagtgatcttacctttagccatttcatagttaggtcagaatatccatttccaagtaatacttgaccactatgtttctaccataggtaaatgataagcttctaaaattatattcacatatatccaaatctccaggagtcacaatctgttgctctataagttttttcaaaacattcttatttacattttttcttggttgtctaagtgacatctaggtggtagtagaaattattcactgatactttatctacaaaatggctcaatcttctaaactcatagttcctttaatattacctttatctcttaataatcagtatggagtctactctgctataaattctcatgtgacattccattttgcaattagtataactcttaaaggtactgaaaagtgcagtattacaataagttgtcaaaggcatctcattactatgaagtccatgaagtttaaaaattttaaatttatctcttattttcaaactagctaccatctttaaaaattcagcaaagtggtaactggaatattaatagctataattatttcttaggtccatgcttttcagaaataatgcttaaatgtttacttacttcttcataatatagcacaatataatcatttagaaattatgtaagtttgatattaacaaatatcattaacttacatttttatttatcttgcttgaaaaagttaattcaaaatattaatttatttattcatgaaaacaacaattgataatttatcctattctaaatatgaatgataaaatctgagtaagttgcagtcctggcttccatttcatgaatacacaggaaacaaaagctgaaatgaaaacttttcccctaaatatttaaatcacatgtttgatttcatttttaaatggtctgggtataagcaaaaatttgtacattattttatttctctaaatttgacctctttccataaattttctttgccccacttccaaatgcggcgagaattcatgcttctcattgaattcacagatatctttagaatgttttattgcttagtgttaaatatgttgagtaaatactggcttatgttcctaggttacttttctcccttcactgtttagttaaataatcaattctttcaagtaacaacttttaaaaaaactggaatctagaaattcatcaggagtggagatcatcaaaaacgtaattactttatattgttaacattttagtatatacaggtaaattcaaatacataaagagtgtggaaaaattaaacctaatatattcttaattgatgtgatgtgagtgtaacaaatatacaaatcacattcccacaataggaaacaaatttcctgtttgaatttctctgtaaaggaccgacttctgaaatctttatgtaagttacagtcaagacagttgatgaggctatagttcttgaaaaaggggcatgggagggaattacagacattctacaaatttaaaaaaccataaatgtacatattttaagaaattaacagttgctgtaataacataaaagtagatatatgtatgttttaatatatacagcacacacacacttttaaatacttcaacatctcaatgttttgatgatcataaatctgaaaggatctgatttttctataaaatgtaacttgggtggtaaagaggttaatggtaagttgtcttgaatcagattgaaatcccatcgtaccaagagataatatcgttttacttaacctctatgtgtttataaaaagcgaataatattaaaacttatttcagaggattgtgataatttaacgggataattccattaagacaaatagaaaagtggctgtcacatgggaaatatttccaatagatgtccactgttaaaacaggaatcacaatattttagtgtatgtcatgaattagcacaattgatagtgaattagtataaaagttctaaggaaatatttagataaaatataaggactttgaggagtgaccgaaggatattacaattgaaactagaaattttgggaaagttcaaacgacatacaaggaaaagaagatacgtttacatatttaatacttacacgtttagccacatgatgtcgctgtccaccacaaggtctttctccacaaaagaaataacagcgtgcattacgtattcagatactgctttgcttcatcctctctaaaatttaacaccgaggagtttaagaaatgaagataaggaactcgaattatttttaaactttggatcaatgtaaaggcaatctaatatttggaaaatacttgcaatgttgttctcctggcgagaagatcctggagcccagtgcctgctgctttctcttctgctcctcgcagcctcggaggtggggagcggccagctccactactccgtctctgaggaggccaagcatggcaccttcgtgggccgcatcgcgcaggacctggggctggagctggcggagctggtgccgcgcctgttccgggtggcgtccaaaagacacggggaccttctggaggtaaatctgcagaatggcattttgtttgtgaattctcggatagaccgcgaggaactgtgcgggcggagcgcggagtgcagcatccacctggaggtgatcgtggacaggccgctgcaggttttccatgtggaggtggaagtgaaggacattaatgacaacgcgccagtttttccaatggctgtaaagaatctgtttatttccgaatcccgacagcctggctctcggttttcgctagagggcgcatcagatgcagatatcggaacaaattcgttgttgacttacagtcttgattccactgaatattttaccttggacgttaaaagaaatgatgaggaaattaaatcccttggactcgtgttgaaaaaaaatttaaatcgagaggacactcctaagcattatttactaataacagcaattgatggtgggaaaccagagctcactggcacgactcaactaaagatcactgttttagatgtaaacgacaacgccccagcgtttgagaggacgatctataaagtcagattactcgaaaatgcaccaaatggtaccctagtggtgaccgttaacgccaccgatttggatgaaggagtaaataaggatatcgcgtattctttcaatacggacatgtcagcagatattctgtcaaaattccatttagatccagtcaatggacaaatcagtgtaaagggtaacatagatttcgaggaaagtaagtcatatgaaatccaggtagaagccacggataaaggaaatcccccaatgtcagatcactgcacagttctactcgaaattgtggacatcaatgataatgtacctgagttagttattcaatcactatctttacctgtattagaagactctccacttagcacagtcatcgctctgatcagcgtgtccgaccgcgactcaggagtcaatggacaggtcacctgctcgctgacgccccacgtccccttcaagctggtgtccaccttcaagaattactactcattggtgctggacagccctctggaccgcgagagcgtgtcggcctatgagctggtggtgactgctcgggacgggggctcgccttcactgtgggccacggccagcgtgtccgtggaggtggccgacgtgaacgacaatgcgccggcattctcgcagtccgagtacacggtgttcgtgaaggagaacaacccgccgggctgccacatcttcacggtgtctgcgcgggacgcggacgcgcaggagaacgccctggtgtcctactcgctggtggaacggcgggtgggggagcgcgcgctgtcgagctacgtgtcggtacacgcggagagcggcaaggtgtacgcgctgcagccgctggaccacgaggagctagagctgctgcagttccaggtgagtgcgcgcgatgcgggcgtgccgcctctgggcagcaacgtgacgctgcaggtgttcgtgctggacgagaacgacaacgcgccggcactgctgatgcctcgggtgggtggcatcggtggcgcagtgagcgagctggtgccgcggtcagtgggtgcgggccacgtggtagcgaaggtgcgcgcagtggatgcagactcaggctacaacgcgtggctttcgtatgagctgcagcctgggaccggcggtgcgcgcatcccgtttcgcgtggggctgtacacgggagagatcagcacgacccgtgccctggacgaggtggacgccccgcgccatcgcctactggtgctggtgaaggaccacggtgaaccctcattgaccgccacggccactgtgctggtgtcgctggtggagagtggccaggcacccaaggcctcgtcccaggcgtccgctggcgccacgggcccggaagctgcactggtggatgtcaacgtgtacttgatcgtcgccatctgcgcggtgtccagtctgttggtgctcacactgctgctatatactgctctgcggtgctccgcgccgccaaccgaaggcgactgtgggccgggcaagcccacgctggtgtgctccagcgcggtggggagctggtcatactcgcagcagaggcagcagagggtgtgctctggagaggggttgcccaagaccgacctcatggcttttagccctagccttcctccttgtccaattagccgggatagagaggagaaacaggatgtggacgttgatctctcagccaaagtgagtaatttttatttattctttccaaaatgtctttgtttttcattcctcaatgtttccactcctctggaaatacattaatagttaagtatgaattatgtgattcataattagacttttccagttttgtggttttgtggttaaaacggtaagatttttgttgctaatttttgaaccaaatcagcagtaagttatgatatccacacttgtaattttgttttgttattaggtgcagtagtagaattattttattgctaaatgcctgggtataagacaaatattttttcttagatgaattgcattatttagagaatctgacttcgacttgttttatacttatccctatacaatgcttcttcaatatcttttgccacttttcatttggacttcctactacctgttagtacaaatgttacttgctcattttatgagttcacctaatgcttataactccctattgattatgcttttccaccttcagtttcaaaaattagatcattacacctgttgtcttttatggaacctcttttattctcttattcacttgtttggagtctcaatccttattttttacttgaatatgattcattttaggccttgtgctctaatttggcaataccgtttattgtttcttgatttcccagttgggaaaaaaatcgagaataacaattgcatttagaattgcatctttgttcatctttagtttatcactactttatttaatactactttaataatactactgtattatatgttaaaatttattactaataactaaaatatcaatatgaagtgaaaatttaatagttgtatagtatatttatatattcattttaaaagaatgttttaaatcttgttaaaaataattttcaatctgaacaatatcttgaaaataattatggtatctaattttaaaactatccctactagcaaaactttttattcattagtgtcttttgcataccatactaaggatgctaatatgaaataagtttgataagccaatgttataatgttattactggttaacttctctgaatagcatcctgcctattaatgtgtgccatgcaataagtagaaaactccaaataaccagaaccaaatgaaattgaaggtagacttttttctaatcactacccctacatatttggttatctcctctagcaattagttggactcccatttaagtttccctaccactggagagaaatagtaaccaactgaaacctggttaatactcattgacagtgtgggaggtctaacacgtaaaatagatatttttcttgactcctctccttcccctcacttccattttctttatttccttttttggcactatcctttgttgctcccttgtccatgaagtagtagccatagtgtgtccatctcaggtcagtattttaaaaatttagttctgttatcagcttcttgaatataatagagtcagccaaagtacttgtcttcccagatatggaacttcaatcttcaaatccagcttgcctcttgaaactattgtctaacaagactcttggcaaagacattttgaagactttggaattttcacttcacagatgtactgatgctatgccaaataaatattgaatagctaccaaataaacattgttttctattctgctgcattccccatctgtacattaaaatacctggtaaatgaaaatattacaaatgaaatgggtgaaaatggaattcttcctccttttttccaatgtgcttgatgtcaatgatcattttgtaaaaatatagtttgggtccccacatagtgaaagtactctggtttctgtttgattcagaaatttggtgggttttttgttgttgttttggtttttgtgtgtgtgtgtttgtgtgagtgtagttcttcaatagagagggagcgtaaagctattttcactagattgattttttgtttagacaaacaggatgaaaataactttatggatataggaggcaaggaaagtttttaaatggctaccattatgtctttatatattaaatttctttatgtaagaaaatgtattgtggtttatttattgggaagtcttcattccccattaatacccaggatgattcaaagatcatgattaccaagaattagaataaaaattaagctaaaacccaagttttcaacattgaacttgaaatacatcttaattggggaaatgtctagagactttttttgtatctttagaaaatcatagaggctattgaaacaccacattttcccaactagatatgcgatcaccttaaattaatgcattttattaggcaatggaaggaagcaaacattttctgcagggtaaatatttaggaaatattaggtaagtccctctgagctattaaacaattaagatacaactattccctttaaaatatatattccaaaaaaggacacacatactcaaatgcttataagagataaattaatgtaataaatggcccacgcgattccaccctggtgctgcagtttgtaaaagaagaaaaaatacctgttcaattggtttgatcatgacattcttcatgggtcagggaagttttaagtggttataaaatggggtaaattggctttagaagagtttagaaatgatgtggattacttatagacaggacaaaatgaacatgcttgtttattaaaaaaagctattggaagcaggaaatattcagtttggctaaaatatataagcactataggagaaaatagaagcttaggcacattacatactggagaacaagcaagtacttataaactgtaagagtcaaaatgagaataccagcgtttctcatgggagcaaatgagttccaatgaataaaattatttggaatgcttttccatgcaagctatttgctataacttcctgcttccttgcactttcagccctgacatgactcaaggaagacatctaattaaatgctgatggtctttgatccttttataaaacatctgcaaatttccctgtcaatagcttgttcttggcaccagaagttccctagagaccagtcccctcaagtcaacaacaccagaaatactagggtgaagagggtgttatcattaataaaaaaaaaccctggaattcttgggaacacaggaatctgtaatgaatttttctaatcaacagtttacagttacatgtttacaaagtgtatagttaggtctctgtaatacttaaaacctgtgttgaaaaaattatttctactgaagtaaaagttgcccctatggcgaaactaaggaccacactcaatcaatcagtggtacaatgtgtaccacagtagtacaaaatgtattcctattctccgaaacgactgaaataataaataaaaccaagtagtttacagtagagtgtgtgggggtttccacaattgctacttacggtttggagccacatgatgtcgctctttaccacaaaatacatgagagaaggaggaagaagggaaaattccttctattcttactggaaggaaccatatacactctttggagtctgaaatatggaggatgcagctgcacttgactgaccgattaaaagatttcccttgactttgagaaacgatatttaatcagaacaaaatactgtgcactaaagatggagttttcctggggaagcggccaggaatcccggcgtctgctgctcttacttcttctcctcgcagcctgggaggcagggaacggtcagctccactactcggtctccgaggaggccaaacacggcaccttcgtgggccgcatcgcgcaggacctgggactggagctggcggagctggtgccgcgcctgttccgggtggcgtccaagggccgcggaggccttctggaggtaaatctgcagaatggcattttgtttgtgaattctcggatcgaccgggaggagctgtgccggcggagcgcggagtgcagcatccacctggaggtgatcgtagacaggccgctgcaggttttccatgtggacgtggaggtgagggacattaacgataacccgccggtgttcccagcaacacaaaagaacctgtccatcgcggaatccaggccgcttgactctcggtttccactagagggcgcctcggatgcagatatcggggagaacgccctgctcacttacagactgagcccaaatgaatacttttctctggaaaaaccacctgatgacgagctggtaaaaggtcttgggcttatattacggaaatctttagacagagaagaagctccggagatttttttagtgctcacagccactgatggaggcaaacccgagttgactggcaccgttcagttactcatcacagtactggatgccaatgacaatgccccagcttttgacagaaccatttataaggtgagattactagaaaatgttcctaatggaacattggtaattaaacttaacgcctcagatttagacgaaggattgaatggggacattgtttattcattctcaaatgatatttcgccaaatgtgaaatccaagtttcacatagatccaattactggacaaattattgtaaagggatatattgactttgaagaaagcaaatcctatgaaattattgtagagggcattgataagggacagctcccactttctggccattgtagagttattgtggaagtagaagacaacaacgataatgtcccagatttggaattcaagtctttatcacttccaattagagaggacgctccactgggtacagtcatcgccctgatcagcgtgtccgacaaagacatgggtgtcaatgggctggtcacctgctccttgacgtcccacgtccccttcaagctggtgtccaccttcaagaattactactcgttggtgctggacagtgccctggaccgcgagagcgtgtcagcctatgagctggtggtgaccgcgcgagacgggggctcgccttcgctgtgggccacggccagtgtttctgtggaggtggctgatgtgaacgacaacgctccggcgttcgcgcagcccgagtacacagtgttcgtgaaggagaacaacccgccgggctgccacatcttcactgtgtctgcgtgggacgcggacgcgcaggagaacgcgctggtgtcctactcgctggtagagcggcgggtaggggagcgcgcgctgtcgagctacgtttcggtgcatgcggagagcggcaaggtgtacgcgctgcagccgctggaccacgaggagctagagctgctgcagtttcaggtgaccgctcgcgatgccggcgtgccacctctgggcagcaacgtgacgctgcaggtgttcgtgctggacgaaaacgacaacgcgccagcactgctagcgcctcgggcgggtggcactggtggcgcagtgagcgagctggtgccatggtcggtgggtgtgggccacgtggtggcaaaggtgcgcgcggtggatgctgactcgggctacaacgcgtggctttcgtacgagctgcagccggggactggtggcgcgcgcatcccgttccgcgtggggctgtacactggcgagatcagcacaacgcgtgccctggacgaaacggacgctccgcgccaccgcctactggtactggtgaaggaccacggcgagcccgcgctgacggccacggccactgtgctggtgtcacttgtggagagtggacaggcgccaaaggcctcctcacgggcgttggtgggcgctgtgggtcccgatgctgcgctggtggatgtcaacgtatacctgatcattgccatctgcgcggtgtccagccttttggtgctcacgctgctgctgtacaccgcgctgcggtgctctgcgctgcccaccgagggcgcgtgcgctccgggcaagcccacgctggtgtgctccagtgcggtggggagctggtcatactcgcagcagaggaggccgagggtgtgctctggtgagggcccacccaagaccgacctcatggccttcagccccagtttacctgactctagggacagagaagatcagctgcagacaactgaggaatcctttgcaaaggttagtgtataacatccttttgtttaattttcgtattgtttttctctatcaacttcttcgtaaatttatttctaagagtcaaatttccctgggttaaaattttacctctttttacatatccattttaactaaagtcttttggaattataggacatcagagcaatatatattgccttccttcattttatgctgcattattcaatgcatattaacagaactgtaatttctagtaaattttcactatattcaccctctttgtttttggtaataatcaacattttagaaaacattttactattatttaacctattacatataaacaaatgtgcacaggctgaaataataaagctccataaattgtatgaaagtgaaaagctccgttgcctccatcgctgaagcccctcgcatgcacctgccaaatcacttcccttatttttcctccagtgtaaccgcacatttgccttttataactgtttgttcggggcctgttttgggaacgttatctaattggacttgcacaacatgtattgtctgtgcatttgtgtgttatttgtatttatcactcattgtttatgaaattatccatgttgttatatgtagttgtagtttatttatttctgtttctagtactatttcataaatatactataccttatttattctactgttcaggaatttgcattgtgcctcaatgtctatttcaaataatgccatcataaatatattgtacatttctttgatgcccatgtacacagatttctctcaggtttttgcctaagagttgtgtttgtgggtcacagaatatgtgtgtatctttgtcttttgtagctaacaccaaccaattttccaagatgtttttacctgtttacattcctagtagtgcataaggctttctgctgggccacatcatctctacatttgtcaggttattttcatgttagccattttactgggtgacttttgtaatctcattttgaaattattttatatttaaatgaagttgagtacctttctattttattttggcaatttttataccttattttgtgcaatagctgctcaaatctcctatttctctagtctgttgtttttcttttcttttttctcttctttttgcttccatagaactttatttatttccttatcttgtttttcttattacttaaacaaatcttgtattctgaacataactcctttttttagtagttttcaacctcatggctagtttttaattcttttttgtcttttggtgaatagaaagtcataattttgattaaactcaatttatcaatttttgcttctgatcctatttcacaaagataattttctgtggtatcttttatttcattgtttacattacatctacaatccatttggaatatacatatttttatcattgttgtgaggtaggggtcaagatttatttttattccttcttattatttttattatactttaagttctaggatacatgtgcacaacgtgcaggtttgttacataggtatacatgtgtgccatgttcgtttgctgcacccatcaactcatcatttacattaggtatttctcctaatgctatccctcccccagtcccccacacctcaacaggccccagtgtgtgatgttccccaccctgtgtccaagtgctctcgttgttcaattcccacctatgagtgagaacatgcagtgtttggttttctgtgcttgtgatagtttgctcagaatgacggtttccagcttcatccatgtctctacaaaggacatgaactcacccttttttacggctgcatagtcttccatggtgtatatgtgtcacattttcttaatccggtctatcattgatggacatttgggttggttccaagtctttgctattgtgaatagtgtcgcaataaacatacatgtgcatgtgtctttatagtagcatgatttataatcctttagatatatacccagtaatgggtcaaatggtatttctagttccagatccttgaggaatcgccacactgtcttccacaatggttgaactagtttacactcccaccaacggtgtaaaagcgttactatttctccacatcctctccagcatgtgttgtttcctgactttttaatgattgccattctaactggtgtgagatggtatctcattgtggttttgatttgcatttctctgatgaccagtgatgatgggcattttttcatgtgtctgttggctgcataaatgtcttcttttgagaagtgtctgttcatatcctttgcccactttttgatagggttttttgtttttttcttgtaaatgtgtttaggttctttgtagattctggatattagccctttgtcagatgggtagattgcaaaaattttctcccattctgtaggttgcctgttcactctgattgtagtttcttttgaagatttattttttactaccatttttttgttggacttttaaaatgagtttggaagtgttccctctccttcaattttttttttttggaagagtttgaaaacaattatcattgattcttctttaaaagtttggtagaattctccaggaaagatatctggttttgggcttttgttgttgttgttgttaggaggtttggattactgattcaatctccttactagttacagctttgtttagattttttatgattatgtcttggtagtttgtatgtttctaggaattaatcaatttcttctaggttattgaattttttggtatatgattttaaaagcctcttataattgtggcatcaggtgtaatgccacctcttttgtttctgacttccagtctttttgtttttttcttagtctagctaaggggcttgtcagttttgttgttttttcaaaaaatcaactaagtttaaaaacttaatttaaactttttttcatttatttttgctctaatctttattatagtatttcctccctttgctttgggcttcctcatttgtcctttttttctagttccttgagttgttaagttttttatttgagatctttcttctttcttcatttttagtgtaggcatttacaactcccttctttgtttttgttttcatgtttaagagacaagatctcactatgatgtacagaggcacgatcatagctccctgcaagtgatccttgtgccttggattcccaaagcactgggattacaggcgtgagccactgagcttgcccagcttaatattccttcttagtactgcttttgttgtatcctgtaagtttttattgtgttgtgttttcatttttgtttatcttaacatattttctaattcatcttttgatttcccctttcattcaaatgaaattttgaacagaatttcgttcaaaattctgttgtttaatttctacatatttgcagattttccagttttaattccagtattgatttctagttttattccactgtggtcagaaaagatatttagtaggatttcaaccttcttgaatttgttaagacttgttttgtgacctgacgtgtgatttatcctggaaaatgctctgagtgtgcttgagaagactgtatatttgctgctgttgggtggaattttctgtatatgtctgttagttccatttcagctatagtgttgttcaagtcctctgcttccttgctgattttctgtctgaatgttctattccttattgaaagtaggataccaaaatctcctactacagtcattggagatacattctgagaattgtatcattctgagatttcatcactgtgcaaacatgagagtgtacttacatatttacacaaacctagatagtatagcctactacagacctaggttacatgatctattgcttctaggctacaaacctgtacatatgttaactgtactgaatactatagggaattgtaacacaatggtaagtatttgtatacctaaatatatctaaacatctaaaaggtacagtaaaaacattgtacagatttttaaaatggtacacctgaatagggtacttaccctatgaatggagactgcggggctggaaatttatctgcatgagtcaatgagtgaatggtgagtgaatgtgaaggcccaggacattactgtgcactaatgtagactttaaagcactatacatttaggctacactcaatttatcaaaaaattttctttttacaggctggtcatggtggctcatgcctgtaatcccagcactttgggaggctgaggaaggaggatcacttaagcccaggagttcaagaccagcctgggcaatatagtgagaccctgtctctagaaaataatttttaaaaattagctaggtgtggtgacacacacttgtagttccagctactcaggaggctgaagtgggaggatccttgacttgaggaggtcaaggctacagtgagctatggtcgtgccactgcactccagcctgagcaacagagtgagactctgtctcaattttttttctttcttcagtaataaattaaccttagcttactgtaacttttcaactttgtaaacttaaattttttaaccttttgactcttttgtaataacgcttagcttaaaacacaaacacattgtacagctgtacaaaaatattttctctttatatccttattttacaagtttttttgacttttaatttttttatttttttcacttttacttagtgtttttttttgttgttgttgttaaaaatgaagatataaacacccatactagcctaggactgtattgggtcaggatcatcaatatcattgtcttccacctccatatcttgtcccactggaaggtcttctggggcagttacacatgcgatgctatcatctcctatgataacaatatcttctagtggaatacttcccaaaagactttcctgaggctgttttgtggtgaccttttttcttttttttttttgagttaatgtattttttataagtagaaagagtacactgtaaaataccactaaaaagtatagtaaatacataaagcagtaacatttactatctgtatcaagtattatgtactgtaaattactgtacataattgtatgtgctatcttgtacttttatataactggtagtgcaataggtttgtttacaccaacatcaccacaaacatgtgagtaatgtgctacaacattatgactgctacatcatcactaggtgataggaatttttcagctccattataatcttatgggactactcttgtacatgtggtctgttattggttgaaacgttgttatacaacacttgactttattgtattgctatctatttctccatttctgtgaatgtttgcctcatatatttaggtgttttaatgttgggtgcatatgtatttataattgctatgtccttctggtgaattgaccttttatcattatataatgtccttctttgtctcttatgacactttttgacttaaagactattttgtgtgatgtagctgtttccacatttgcactcttttggttacaatttgcatgaaatttttttaatatcctttaactttcaggctatccaggtctttaaatctaaagcaaatctcttgtagttagcatataattgggtctttaaaaaaaatcaattcaaccactttgtatcttttgattgggggagtttatcccatttttatttaaagtaattattgatagggcataacttactgttgcctctttgttaattgttgtttgcagcttgtagactttttgctcctctttcctcctcttactgtcttcctttgtgttttattgagaattgtaatgctatgtttttgttcctttcctgttttcttttgtatatcttccataggtattttctttgtggttaccatggggcttacattttaaaactcttataaaaatgtattttaaactgatagcatctttactacaatcacaaaacaaaactcattatgtttacttctcccctacccaaattttatgttattgatgtcataaatacatctttttatattgtgtatacattattttatagttagtttttctgtacttttgtcttttaatcagattttaaaatatcagattttaaagtgacttttgtaccaccattacagtattatagtattctgtttttatctatatatttatctttactagtgagctttatactttaataaaatacctatgtatttctgtttagcatcccctaattttaactcaaaaggccccctcttaacatttcttgtaaggcaagtctaattgtgatcaccttcagcttttgtttaactgggaaggtctttatctctttttcatttttgaagacaaactttggtggatttggtattcttggctggcagttctttttcttttcagcactttcagtataacatctcacccctttctggatggcaaggtttctactgagaaatctactggtagagttaggggtgttcttttgtacgtgatgaggcatttttcttttgctgctttctaaattcttaacatttcttggatcttgatgtccatttccttcctcatatttgggaagttttcagatgtaattttaaaaaataagctgtctgtccttttctcttatggcttcttcttttgaaactgtcataatgagtagagcagcctgctcgaggatgtcctatcaatttcttaggctttctttactctctttcatttcttgctctttttgctactctgtctggataatttcaaatgatgtgtccttgagttcactgactcattcttctacttgattaagtctgctgttgaacatgtctgtaaaattttcagttcaattattgtattcttcagttccaaaatttctttttagttcttttgaatattttctatctgctgaaattctgattctgcttatgcattattttcctgagctcactgaacatctttatgacaattattttgaatactttgtcaagtaattcacatagctctatttctttaggtttggtttctggaggtgtgtttgtgtgtgtgtgtgtgtgtgtgtgtgggcacgcactatttgattgggccatgtttcctgttttctcatattccttattactttgtgttgatatctatacatttcaaaaaaacaaaaaacaacaacacaccagctacctcttccagtctttatggactggatttgtacatggaaagatctttactaatcaggctggctagagattctagggacctctcaaaccttttctgtggatgcatcttctatggacttgtgtgtataattcctaattagagggatctgccagcttttttttttaagatgctctaatctttttccctctgtggtgtctgtgtgctgtactgtgggccctctggagcagcagtattcactcagctcttttaggttctgagaagccctcagttatagattctgctgaatcctatcagtgcctggagtcaagtgagacagaaacttggactgcccactaaaattcaggaactttggatgcattttactctctctttccctcatgagagagagagtgctgagctgagtttctctctgtgtgctgtatcacaggtcctgaggagcatcagcccgccacccagctctttattattctgagctgccctcaggattttagaatatgccaggttccatcagtgctctgagatatgcaagacagctcccctgaaaagtcagaacactgaatgcatgctttactttctctttcccttctcagggagaagacaggagctgggaatttccccctgtttgaatggaactgtgctgctggatgggactatagggaaagtgccccagaaaagtgcccagctagttttacacttgcttggagcccaggaccctcttaactggtttcggcacttatcaccatgggaattggtccttgtattgttgttgagttggtatacctgtggagggtctggggattcctataacagcatcttgctgatgtcactacctctgttatctttttaagctatatatgcttttacaaattattttattgatttcctcttttgttgattataacacacatccttgacttattacctcaattaaatcaataattttaataattccaggcaacgctaagaccttgaatcattataccatttacttgtaccctactttttgttactgatatgcctttcaattatttatatgttctagacacacagtacattattatcattgttttgttaacacctatatatgtttctttctgggatcattttccttctgaagaaattaacatttcctttagtgtggcctgctggtaaagaaacctttacgtttttatatatctggaaatgtcttaattttactatcacttttgagaaacagttttgggtattgaatgaaagttatttttgccagcacttttaagatgacattccatggtcttcttttgagatgatggctgtcaagtttattgttcaattagtgtgtctttttttctgtctagctactttgtatacttactctgtttttcacttttaacagctttactatcatgtgcccagtgttaatttgctttgtttttaatctcgcttgcagttttcaaagcttcttatatctgtgggttgataatattttatcagtttaagagaagatttagcagtatgccttcaaatacggcttctacttcatattttctcttatattcttctgtgactataagtacatgtatgttaaatcttttcaccatattccttgtcttttatgtgccatttctgtttttaaatcactttttctctttgtttcataatccatgttttattctgacccatcttttactttaggaattttatcttgttattctaggccactgtcaaagtcattgattgaattcttaacttgaatcgtggcatttttccattttagaattttattttcctttttaaaaatatatttctaacttgggtactggctaatgtcaaaagaaactttcctcccacaaagttttcactcacttgatcttggattttaaaatcagatataacctgagagattatcatttttctccatttaataatgaatcaggccaggcatggtggctcatgcctataatcccaacacctgtgtgggccatgacaggaggattgcttgagcccaggagttcaagatgagcctgagcaatatagggagactccatctttacaaaaaatgaaaaaaattagctagatgtggtggtgcacacctgtggtcccagctacttgggaggctgaagttggaggatggcttgagcctgaggctgcaatgaactttgactgtaccactgcactccagcctcggtcagagtgagactctttgtcacccagttgtatagaatcaactataggtagaggcataaaaaagatgcctgagattgcatctcttgaatttagcttcattgtccctttctattaagtgagattatttgacatgaacattgatattcactatctcagggatatgttagaactattctcatattttctatccacagaggatatataatatggatattttagcacattcccttatagggcagttataccttcctctgtgactcattatacaggcagcgctaagatgtgtattatatgctcatggtatcctttcttactatccttataatagaataaattaatttttatacagaattaatttttgaagaatcaaatgacatatgtgcataaattatttatacatttttatacaattgcttcaacatttcctcttctctgcaatctggtatatctatataatttctatagataagagaagaaaaatatagcttattaaaattttattctgggttttgtaaggaataaaggacatttgtacccttatgaagattaaattttcttgtgttagtatatttctaaaggcttttagtgaattaaatggagacactttaatatactacacagttttaaatctaaatttttttctcaaggaagaacttctgtttacacaatgatgcttaaacatgactgaaatatctaaaggagaggttaactggatcagtcaagaaaataatctgtaacatttgattgaagaaaatagcttagaagaagattttttaaaatgttcttttcctgtggagtctcccatgaaattcagattggataatctatagttactgagaaaggaatattcaaaataagagttgatcactgtagcacaaatgcaagtgataatttaaaaagtaaatataatttaacagatatgaaagtgaatcaaaagtcaagagtcttgtttcctcctgaaatatctatataagtacatgagatattttttccagactgagaggagcatgtgaactgatattgttgatgactttttctccattgagtatatcttttaaaatactcagtatttatcataatactctgcagattacaatgtacacattgttaatactacattgttaatttgccttttaaatacttaatatttacttttttcaaaggttatctttgtgtattttgtataaaattctactataatttattccatagctttgtagttttacattatttactgttatataatagaaagtggctaacatcagctaatgctgttttctaaatatttattatcattttcttatgtttttaaccattgtgtattaaaatatttcaaaattatcagtatgaaaactattaggcaaatagtctgggaaattgatttgtgtttcaacgatccaaatattagtgaaaagtcatgataatagagatagtaaaaatcttataagggaactggtaaatatatctttaaagattgtatcagaaacaattctatgacaatatcttgtttctttacaagtttgaattccagaaatcaagtgaatttcctctgactttgcattttctggtaatttcttttttcttatcaagctatattttaaatgtaaaagtatccaacaatagaattgctaatctcttggtccctcttgtcttcacaggtaagggatattttgtaatatttaaggaattttatggagtatatatacaagcagaatgttagctatttcttcaatagaaaacttggtgatattttcttttgcccatatttattaagtgaagtttactaaattttctaggtcgtgttcaaatcataccatccagtaaacagttgggagattaaaaagtaattaaactaatataaagatagcctggttaataaaatgatattcttttcaacatgattatatttactggaacctaaacattttgtgaaatagtatgtcatatagacaatattaggattttgacttgttatgtaagtacaaaggtatgtattttacaatttttaataattgctttatcagtaatagcaacttgaagaaatgctatctagatgcttctaatttgaaaatagtgcaaagacgatttaccaaagtcgttctattatgcttttgatttctagaaagctgaaatatccccattacagtttttgagtcaatacaaaaagtagataggtgttatagataaagaaataggttttcatcgatttgaaaattagaactccgagaagaaactcaggtaagaatgccattaaaatagttttagttgtttttgaaaataacatcaacaaaatgtcactattaaacagtgaaattggaataaaaatttgttttatgagtaacacggagatagcatacaaacattccattgactaatacagaaaaaactcaaaagttttaattagatatgtttaaatagagatgagaaaagtcaaaactttaactcttaaaagttatttttatcagtttggaaatatataaactcctccctatataaaatacaccagcacaaatttctctagtaaggattggggtttcatgactttagatgtatttttctgtaatattttaatgacgcacttatattgacgcattttaagatagagtttaatgatatattttgactagagataagtgatttaaagaataagaatcatgtcattgaaagtgagaatacttgagaaatattgacgaatataagctaaataaagcaaaacaaaataaaacacttaccctttcatccacatgatgtcgctggacaccggaaggtttttctcccttcccagcctcaaaggaatacagtgagtagattttccttagacagaaaggaaaagaaccttccatttttggctgtgccaagaagctcagaaaggcgataatataaaaaatatatagttaattgggaattgaatttacaaaatacattgtgtggtgatgcaatagaaagctcataattggaacgagattgagatggtatattcccggagaggaagtctgggatcccggctcctgctgctctggcttctccttgcctactggaaggcagggagcggccagctccactactcgatcccggaggaagccaaacacggaaccttcgttggccgcatcgcgcaggacctagggctggagctggcggagctggtgccgcgcctgttccgggtggcgtccaagggccgcggggaccttctggaggtaaatctgcagaatggcattttgtttgtgaattctcggatcgaccgggaggagctgtgccggcggagggcggagtgcagcatccacctggaggtgatcgtggacaggccgctgcaggttttccatgtggaggtggcagtgaaggacatcaatgacaatccgcccaggttctccagacaagaacaaagattattcattttagagtcaagaatgccagattcgcggtttccgctagagggcgcgtcggatttggatattggagcaaatgcacaattgagatacaggttaaatccaaacgaatattttgacttagatgttaaaacaaatgaagaagaaacgaactttttagagctggttttgaggaaatccttagatagagaagaaacacaagaacaccgtttattagtgattgcaactgatggaggaaaacccgaactaacaggtacagttcagttgttgatcaatgtattggatgctaatgataacgccccagaatttgataaatccatttataatgtcagattgttggaaaatgcaccaagtgggacattagttattaaactgaacgcctcagatgcagatgagggcatcaataaggaaatagtgtatttctttagtaatcttgttcttgacgatgtaaagtccaaatttataattaattctaatactggtgaaataaaagttaacggggaactggattatgaagactataactcatatgaaattaatattgatgccatggataaaagtacattcccattatcaggacactgtaaagtagtagtgaaactcctggatgtgaatgataataccccagagatggccataaccacccttttcctgcctgtcaaagaggacgctccactcagcacggtcattgctctgatcagcgtgtctgaccgtgactcaggtgccaacgggcaggtgacctgctccctaatgccccacgttcccttcaagctggtgtccaccttcaagaattactactcgttggtgctggacagcgccctggaccgcgagagcgtgtcggtctatgagctggtggtgaccgcgcgggacgggggctcgccttcgctgtgggccaccgccagcgtgtctgtggaagtggccgacgtgaacgacaacgctccggcgttcgcgcagccccagtataccgtgttcgtgaaggagaacaacccgccaggctgccacatcttcacggtgtctgcacgggacgcggacgcgcaggagaacgccctggtgtcctactcgctggtggagcggcgggtgggcgagcgcccgctgtcgagttacgtttcggtgcacgcggagagcggcaaggtgtacgcgctgcagccgctggaccacgaggaagtggagctgctgcagttccaggtgagcgcgcgcgacgcgggcgtgccgcctctgggcagcaacgtgacgctgcaggtgttcgtgctggacgagaacgacaacgcgccggcgctgctggtgcctcgagtgggtggcaccggcggcgcagtgagcgagctggtgccgaggtcagtgggtgcgggccacgtggtggcgaaggtgcgcgcagtggaccctgattcgggctacaacgcttggctttcgtatgagctgcagccagcgcctggcagtgcgcgcatcccgttccgcgtggggctgtacacaggcgagatcagcacaacacgctctctggatgagaccgaagcaccgcgccaccgccttctggtgctggtgaaggaccatggagagcccccgctgacagccacagccacagtgctggtgtcgctggtggaaagtggccaggcgccgaaggcctcatcgcgggcgtcggcgggcgctgtgggtcccgaggctgccctggtggatgtcaacgtgtacctgatcatcgccatctgtgcggtgtccagcctgctggtgctcacgctgctgctgtacaccgcgctgcggtgctcggcgcagcccaccgaggccgtgtgcacacggggcaagcccactctgttgtgctccagcgcggtggggagctggtcgtactcgcagcagaggagacagagggtgtgctctggggaagctccacccaaaacagacctcatggccttcagtccaagccttcctcagggtcccacctctacagacaacgtgagttttctaatattaacatccatctttccctcccaattttcaaatattaaatgtcacattcacccactttttttgtatttaaaaattatgtcttagtacacaaatattgtggtacacaattattgcactaattcatgtattatatgctttttatgaggcttttctgctggggtaatagattcatcagctttctgtgatattaagtgtttttaaaataatattttatattagcatttgaattttgcatctctaaaaatgtaggataataattgtaagacatagtttggagtcattctcaaagtttcagtttatgactacatgaaaatttattttattttattgttattttttagagaccctttgttgcttagtctgcagtgatctgatcatagctcaccgaagcctgaaactcctgggctcaagtgatcctcctatctcagccgcccaagtagctggactacatgcacatgctaattaaagttttttttttttttttttttttattttctgtagagataggggtcttgctactttgcccaggctggtcttgaactcctggtttgaagccatgctcccgtctcagcctcccgaagtactaagattacaggattgagcaagagtgcctggcctataaaaatgttttaacaccacccttccaattttgcctttttgtttctattgaatttaaattaattattattttattacactaatttagtttgttttcaattgtatttttgcagcatatggtttatttcaactttgcctaagcagttcacctgtatacccatgatgaatttgataattgtaatttaaaaattatatttttcattttattgattttttgaataggaaacacatatacatggtttactgttctaaaggtgcaaaagaatacagttaaattttccctttcacctccttcatgaagccaaaacattctctggtatccttctagagatttttttcatatacaaataaacttccctacccccttaaaaaacatatgagtattgattttaatcttgcttttttcatttactaatgtatcttgatgatcatgaattatcattactgaagtagatttgtttttcttttatctggatctatggtgttccattgtgtaggtatgtgattggttatttttcccttaacattaacatttagtggaacaatgatttaattttctggaaatttgcatatttttcaatatatctaatatatattagatatataaatatctaaaatatctaatatatatctaatatattatatattttatataatatatataataaatatataataataatatatatcagatattttgatacagaattttgctcttgttgcccaaacgagtgcaatggtacaatcttggcctcccaggttcaagcgattctcctgccttatcttcccaagtagctgggattacaggcatgtgcccacacctggctaattttttgtatttactagagacggggtttcaccatgttggtcatggtggtctcgaactcctaatctcaggtgatttacccgcctcggcctcccaaagtgctgggattgcaggcatgagccatcgcgcctggcctaaattattatattgatgaggagtaactgtgaatctcctcagttgtgcaaattctactatattttggttgggaaattttactgcttgttgttacttttagattaaaaaaataaatataccatgatacaaactcccctcttgagttgtttacaaagagttgtttattaaagctgtatgtttgagactacgctagacaggtgtcctctccatctgaaataatgagaaccatttgtctactcttttgaggggaaaagtatggatttataggtagtaaatagtccacactttacatgataaaatgtgaattccctatttctgttgctttgcctgtttcttttattctcatatgcattcaattttataagtacccttctatcatgctatttatatattcctaatatcctgagctactttgaggaagtcctagaaattgagaaatagtttttgtcattctataaatctaaagttaacaatggtcacattttaaaaaatcaagttttgtgatataaactatttatatatctctttatatatcaagtctttatgtatattttgtgcagcttgtcttttttataggaacctcttgttttggggattgtttttggttaagaaattgaaccctttgtttgcccaaaataactgcaatagaaagtcagtgataagaactactaaatagatccaggttaattattttaagatagaatttcacatggaagaaaaggctttgtgtcacaatcatctgtgaggcattttactgtatatcagaattttggagtaaggtgaagatgatcatgtcatttgaaaagtcttattggtgactctatttttctcctttgaaggaggggtttaatcacttcaaatggataacattaaggttaaattaagggcgaagttgatatttggccctgacttttatatgaaggtaacatttttgcaagtaaattgtagacgtaattaaaaaaacccagctaaaacaaaggtggtattgagaaagaggaagagcaagtggtctatattgtcagaaaaataagattcatattggagagtaattgaaaataacctgcaaaaagttgattacctaacatgtgattacatattaggttactagaagtttctcaagtgtcttgcaatttctaggtttagtaaaattcaatgaaagctgtactcataaagataaatatgatagcatgtgaaagacagatggacttaggtggatgtggaataaggcaagccagggaaaaggagtaatttaaaaagtaatataggtgacatgggaaatgctcatgtcattaaaaatatgaatttaaaaatttgaatttggggattattaataattgctcatgccttgctatttaacaaactattttctaggagtcagcatgtataggtgaaagtgacaattagaaacatagaaagaagggatgcagatatggatttgtaaatacctcaataaaagtcttattcaaaacttggaagtgagtgagaacaattaaaggaaaggatatgggacagggttgaagttgagagagaaaaacgagatcatttaggaacagctgaagaatcaaaaacagcaaagcacaatgggtagaaattccactagaatttgaagtggtgaagtatatgaaaagaaaatattttaagcaagaatcctaatataagctgcagataaattaaatgtgataaagaatatgctctagaattttatcttccatcattacacagaagaaccttaagagcatctgatatttattgaacaaagaaagcatggacttcaataatctataaggctttaaaaattcaaccaaaatttgataattttaagttacattttttccctagagcactatataatagcatgtcctaggaaagacagatgtgggcaagtttcttttctaccaagagtgtagaatagtttacatttctgatttaaaaagcagttccgttaacacttaaatttgctgaactggttgatattaatgttgcaaatattggtagaaaagttgtttagctgtgaataattagatcccttactttaaattaataaaagaagtcgggataacactgaccgtgcaaattacaaacgtgaggagggtttactataaaagtagagaaaagaagatactgttttaaaaatatatggtatagcactgttacgtgaattgatttcttaccttttggagccgcatgatgtcgctgtctaccatgaagttatagctagccaacattcaaatttcttctattactgcatcattccctgactgttgaatgatggcggacgcagaagaaatggattaataaattccggaacatacagtattttatctttatgcggaagatcttctaatggaaataaaaccagaggtatttgacatggtgtttaccccggaggatagattgggaaagcaatgtctgctcctcccgcttctgctcctcgcagcctggaaggtggggagcggccagctccactactccgtacccgaggaggccaaacacggcaccttcgtgggccggatcgcgcaggacctggggctggagctggcggagctggtgccgcgcctgttcaggatggcctccaaagaccgcgaggaccttctggaggtaaatctgcagaatggcattttgtttgtgaattctcggatcgaccgcgaggagctgtgcgggcggagcgcggagtgcagcatccacctggaggtgatcgtggacaggccgctgcaggttttccatgtggacgtggaggtgagggacattaacgacaacccgcccttgttcccggtagaggaacaaagagtgctgatttacgaatctaggctgccagattctgtgtttccactggagggcgcgtccgatgcagatgttggctcaaattccatcttaacctataaactcagttctagcgaatacttcgggctagatgtgaaaataaacagtgatgacaataaacaaattgggctcttattaaagaaatccttggacagagaggaagctcctgcacacaacttattcctgacagccacagatgggggcaaacctgagctcacaggcactgttcagctgctggtcacagtgctggatgtgaatgataatgctcccactttcgaacagtctgaatacgaagtaagaatattcgaaaatgcagacaacggaacaacagttatcagactgaatgcttctgatcgggatgaaggagcgaatggggcaatttcatattcttttaatagccttgttgcagccatggttattgaccactttagcatagatcgaaatacgggagaaatagtgattcggggtaatttggattttgaacaagaaaacttatacaaaatcctcattgacgccacggacaaaggccatcctcccatggcgggtcattgcaccgttttagtgagaattttggataaaaatgataacgtccctgagatagcactgacttccttatccttgcctgtacgtgaagacgctcaatttggtactgtcatcgccctaattagcgtgaacgacctcgattcaggtgccaacgggcaggtgaactgctcgctgacgcctcacgtccctttcaagctggtgtccaccttcaagaattactactcgttggtgctggacagtgccctggaccgcgagagcgtgtcggcctatgagttggtggtaaccgcgcgggacgggggctcgccttcgctgtgggccaccgccagcttgtctgtggaggtggccgacatgaatgacaatgctccggcgttcgcgcagcccgagtacacagtgttcgtgaaggagaacaacccgccgggctgccacatcttcacggtgtctgcgcgagacgcggacgcgcaggagaacgcgctggtgtcctactcgctggtggagcggcgggtgggcgagcgcgcgttgtcgagctacatttcggtgcacgcggagagcggcaaggtgtacgcgctgcagccgctggaccacgaggagctagagctgctgcagtttcaggtgagcgcgcgcgacgcgggcgtgccgcctctgggcagcaacgtgacgctgcaggtgttcgtgctggacgagaacgacaacgcgccggcgctgctggcgcctcgggtgggtggtactggtggtgcagtgagcgagctggtgccgcggtcactgggtgcaggccaagtggtggcgaaggtgcgcgcagttgacgccgactcaggctacaacgcgtggctttcgtatgagctgcagcccccggcaagcagcgctcgcttcccgtttcgcgtggggctgtacacgggcgagatcagcaccactcgtgtcctggacgaagcggactctccgcgccaccggctgctggtgctggtgaaagaccacggtgagccggcgctgacagcgacggccacggttctggtgtcgctggtggagagtggccaggctccaaaggcgtcatcacgggcgtcggtgggcgccgcgggcccagaggcggcgctggtggatgtcaacgtgtacctgatcatcgccatctgcgcggtatccagcctgctggtcctcacgctactgctgtacacagcgctgcggtgctcggcgccacccaccgagggcgcgtgcacggcggacaagcccacgctggtgtgctccagcgcagtggggagctggtcgtactcgcagcagaggcggcagagggtgtgctccggggagggcccacccaagatggatctcatggcctttagccccagcctttcaccttgtcctattatgatgggtaaggcggagaatcaggatttaaatgaagatcatgatgccaaagtaagtgaattttcataattaacagttaatttttattttaaatttataattgttttcctcatatttgtcttctatatttctgtttttaatttttaattaattttacaaaattacatattttcattttattgtgtttcttattttaatctctttgcttctttaatattcataatttaagtgaaattagaaatcactgtccacaatctgcacctcagaatttttgtcttcaaaccaaaatattcttggatatgtcgttttctgttgcattttaattcagaatcatagtagcatttttttctgattaattatatgggattttcatttgtttgcctttgagctttaggataatttttttacatatactcttttttgatcatatattgaaatttgagcaccagtgtatcacttatgtttttacactttccatttcaatgtttttctgtcgacacttttattaagctaacgctttgattttatccattttgtgtaagaactctgatcatcatagtttttatctgtggttcccttttcagacttgtgattccgggaggcaatagtgttcatttattgtcccccttttaaaccattgaggaataaaggacaaaaacaatagttatcagcctgaatacttctggttgttatggttattgatttatttactaccgatctaaataatggaaaaatagtgattcaacagaatttagaccttgtgatcaagtaaatttatatgaaaactgcattcctctggcattgcggctctcttatttctgtttgaatttcacttgatggtcttctcttcatggagtctaaatctatttctttgtattagtgttttcattgtttctacacagtaatttaaactattcactattttgtatgtgtgtgtgtgtgtgtgacagggtcttgctctgtcacccatgctggagtacagtggtgcaataatggctcactgcaccctcgaatgcctgggctcaagtgattctctcacctcagcctctggagttactacacacgagcaccaccatgccccccaccttttttttttttttttttttttttaagagatggggtttctccatgttgcccaggctggtctcaaactactgggtgcaagtgatctgcccaccttggcctcccaaagtactaagattataggtgtgagccactatgcttggctagtcattatttctttgaatgaaaagcagcaaaaagtagtgattaagtgtgagttttggtgttatcctcccttgcctaaatttcatcgctaccaattttgttttgtggatggattgtttcacctctatttcagtttcttctgtaaagttggaatgataaacactagtttcaatgatagaattgtcataaagctttagtaagttgatattgtaaggcgcttataactgtgtttgccaaatagcaagtgcttaaaaaatttgctactagttttccgaagaggaaaagaaaaactttatgtcattttatgctaggaaactctcattacggattccatattgttttcattttacgtaaagattgaatttttgttattcatagtgaggccataattaccaatttaatctgagatgtctctaacattttaaatgccatgttctacattaaaagcaatttaaaatgtgtgtttcaaagttgaaaattgaattaagacttggacagtggaaaagttttatgaattcaaaagacatttaacctgctgagtcctcagtgatttcctggagttggttttgactttttgtgttgtccatgttcccaggaaatattagactacattaagcatgaatggtgtatttgcccacatttaaaagttgcttaagggccattagaggactgagttgtggtttgtgtttcctaatgtgagcattttccattcttgaaatggcagaaactggtagtggtattttctgttttctaaaagaagtacatgataatttttaagcgtgtaattaatattgcactaaaatttaaaaaaactaactctacatacttaagagtggcagaattgtctctgattatactgaagatcaccatttgtgtagctaatgatatctaacagcctcaaaacagcatactttcttaggaagtagagaactatagcgttgctagtgagtaaatgttttttaaaaagttcctaggagggtctttaagagtatcacactgtgcctgctgagaatcatcgaattaacaagacctggcttcaaatttaatagataaataaaggtaagtatcctacataaatacgatgatagtaaaagcaagaatattgtaagaggtgctagaaaggtacatcatagtgttattggaattggaaaaaaatctttgcctttttcccttgttgaaggagaccgtgaagagtcatgatgttttactggttataaaatggaaagagttttccctgggagaatatggagactaacaggtattcatgagaagagagtaacttaagtgagtatacagaaaattccaaatgtacctagaaatgaggaatagtccactttgggtaaagcacatggttcccataagagagagtgtgatataaagcaagaaaagtaatatgagaaaaaccttttgtataactttgagtactagacgagtaattttgacactcttcaaagtcatttgaaagctgtcaaaaagtgtgaagcaatacgaataaaaagtattaacggaagatgactgcaaggattaaatgaaggagaatgaaataggaatggacaggttacacaataagaagctactgcaatacaccaggagagcagcaattataaaaacttatttaggaaagcatctgaatacagacataattattttacatgccattgggaacattggagtgaaacattccagaaaacgaacacagtaaggtagatccaaaaaggatgaaatacctcaagacttgatcaaagggctgctgtatgtgagatggctgagcactgaaatttatctaataaaataaacttacattttaaaagaaataatacaaatcatatttgagattgtaaaaataggcatatattcataacacacaagtgttcgaaaggatagaatgaggaaacaaatataaaatgatgaactcctgaaacagtatatatagattctgctaaagcaaaaaattcagaatacttcctcctcaaaaagttcacatgatacaaattcttccccttcaaagattccccaaaccttctcttattttgttttcccaagagaagtgtctggatagttgctaatgtttcttgcctcctaaaaagaaaacacacacacacacaccgctttctaagtttctctttcatcaatcagtagattcttgagatcctgggtccctaaaagagtacaggatttttcttaacaagcgatactgaatcaagaatatgaagtttcctgggatctagatcaaaggaatttaaacttgcagttgtttaaattcatgttgtcacttaggtttctatctttatttaaaactgtgtgaaaaaaaagtttttctaaggcatgaggaagctacagttctggtaacactgagtattcaaaagccatcagtcgcctaagaatgcttctaacaatcatgagaaatgctattttaacctttaacaacaatgaagaaaaaaattcagagtttgaaataaaacttttcatctgattaatagtttgtaatggtttgtaattcttacttacatgatggccacatgatgtcgctctttaccgcaaattctttcgtaatcagcaaaaggaagtcattccttttcgcactggaaagacgctccactctctttcactctttggatgcacaacaatggccacacatcgagattgaaatgaagggataaaaacattcctataaattcgaaggcaagttttgctgactagaaaaacaagccaataatttgaaatggtgtgcccgaatggatacgacccagggggccgacatctactgctgtttattataattctagcagcttgggaggcagggagaggccagctccactactcggtccccgaggaggctaaacatggcaacttcgtgggccgcatcgcgcaggacctggggctggagctggcggagctggtgccgcgcctgttccgggcggtgtgcaaattccgtggggatcttctggaggtaaatctgcagaatggcattttgtttgtgaattctcggatcgaccgcgaggagctgtgcgggcggagcgcggagtgcagcatccacctggaggtgatcgtggaaaggccgctgcaggttttccatgtggacgtggaggtgaaggacattaacgacaaccctccggtgttcccagcgacacaaaggaatctgttcatcgcggaatccaggccgcttgactctcggtttccactagagggcgcgtccgatgcagatatcggggagaacgccctgctcacttacagactgagccccaatgagtatttcttcctggacgtgccaaccagcaaccagcaggtaaaacctcttggacttgtattacggaaacttttagacagagaagaaactccggagcttcatttattgctcacggccaccgatggaggcaaacccgagctgactggcaccgttcaattactcatcacggtactggacaacaatgacaatgccccagtgttcgacagaaccctgtatacggtgaaattaccagaaaacgtttctatcggaacgctggtgattcaccccaatgcctcagatttagacgaaggcttgaatggggatattatttactccttctccagtgatgtttctccagatataaaatccaagttccacatggaccccttaagtggggcaatcacagtgataggacatatggattttgaagaaagtagagcacacaagatcccagtcgaggctgtcgataaaggcttcccacccctggctggtcattgtacagttcttgtggaagttgtggatgtaaatgacaatgctccacagttgactctcacttccctgtctctccctattccagaggacgcccaaccaggtaccgtcatcacattgattagcgtgtttgaccgagattttggagtcaacggacaggttacctgctccctgacgccccgcgttcccttcaagttggtgtccaccttcaagaattactattcattggtgctggacagcgctctggaccgcgagagtgtgtccgcctatgagctggtggttaccgcgcgggacgggggctcgccttctctgtgggccactgctagcgtgtccgtggaggtggccgacgtgaacgacaacgccccggcgttcgcgcagcccgagtatacggtgttcgtgaaggagaacaacccgccgggctgccacatcttcactgtgtcggcgggggacgcggacgcgcagaagaacgcgctggtgtcctactcgctggtggagctgcgggtgggcgagcgcgcgctgtcgagctacgtgtcagtgcacgcggagagcggcaaggtgtacgcgctgcagccgttggaccacgaggagctggagctgttgcagttccaggtgagcgcgcgcgatgcgggcgtgccgcctctgggcagcaacgtgacgctgcaggtgttcgtgctggacgagaacgacaacgcgccggcactgctggcgcctcgggtgggtggcactggtggcgcagtgagagagcttgtgccgcggtctgtgggcgcgggccatgtggtggcgaaggtacgtgcagttgacgctgactcaggctacaacgcgtggctttcgtatgagttgcaaccggtggcggccggtgcgagcatcccgttccgcgtggggctgtacactggtgagatcagcacgacacgagccctagatgagacggacgcaccgcgccaccgccttctggtgcttgtgaaggaccacggggagccctcgctgacagccacagccaccgtgctggtgtcgctggtggaaagcggccaggcaccaaaggcgtcgtcgcgggcatcgttgggcattgcaggcccagagaccgagctggtggatgtcaacgtgtacctgatcatcgccatctgcgcggtgtccagtctgttggtgcttaccctgctgctgtacacggcgttgcggtgctcagcgccgtcctctgagggcgcatgtagtttggtaaagcccactctggtgtgctccagcgcggtggggagctggtcattctcccagcagaggcggcagagggtgtgctctggggagggcccacccaagacagacctcatggccttcagtcccagccttcctcagggtccatcctctacagacaatgtgagtcataaataatcttgtttccaacaattttaaaacaattagttcaattggtctccttaaattttctttcataatttcttttttagttgatagctttatgtataattattattttttaatgttatgctgtatttgcactaattatttggaagtacgtttaatatacacttttgttttgggatgcgtaatactatagatcaaaatctatggtttatgttggctactctccatttttggaggaggactttgctaactggagcaatggattcacctttcttctatagtgtatttacaaaatcaaatatttacatttccatattttgataatcaatacctataaatgttatagtaaacaaatttaatatatatgttacctaatattttattctatgtattgtcctcattttataaaatatagctgtgtcaaaatcatctgttcaattttgcctttttatctttagtctagaacttgaattttaagcatttcttttacatctatttatcttctttttatcatatttgtgtagcactgacttctttttaacttactttgttgagatgtatttgccatgttcatgaagaattaatatgaacaatttaaaatagtttaaatggcagtttaatagtattttttattttgttccttgtttgtataagaaatatattcacattcaaaatttcaaagagtgaaatctagtacgtagtaaaaaatctccttgcctcctcaaaccccaaaccatttactttacctttctgaatttctgaagcagtttactttttttgtatattcccaagattattattgccaaattatataaatatatttacaatcaccaaattgtaaatcgccaatatatatattttataatttgccccttccttccttccttcctttctttctttctttcttcctttttctttcattctttttcttttttctttcttctttcaagacacgctctcactccatcacccaggctgctgaaatgcagtggtgggattatagcccactgcaacctgaaagtcctgggctcacaggatcctcccatctcagcctctggagtagctgggaatacagtttgcatgtcattgtgcctggctaattttattttatttttgtagagacagggtggagtcttgtttcccaggctggtcttgaactcctggcttcaagcgatcctcctaccttggcctcccaaagtattgggattacagacacgaacaaccacacccagcctgcctttcatctttccttttttttaaaaaaagaagtgattacagtagaaacctacctttctgcactttttggttttccactttaagttatatatatatagtgtgtgtgtgtgtgtgtgtgtgtgtgtgtgtgtgtgtgtgtgtgtgtgtgtgtttgacagagttttactctgtcgccctctctggagtgcagtggtgcaatctcagctcactgcaaaatccgcctctctggtacaagcagttctcatgcctcagtctcccaagtagctgggattaaagacgccaacaaccaagccatgctaatttttttttttttttgtatttttagtagaaacagagtttcaccatgttgccccggctggtctcgaaatctgggactcaagtgatctgactgcctcagcctcccaatgtgctgggattacaggagtgagccaccgcatccggcctaaattatatattgggttttgtggcatattatttcattagcgcttattccttgtttttgattatttgctttcttatttttaaaagtatttgcatcttattttcttttatggatatatcatgatttattcatccagtactgtattagggacattaatgaaacaataaccgaattgtctagacttttaaaaattttttacaaataatttggttggtcaaaaaaatgatagttaacggggcatggtggcacacacctttaaccccaacatttcgggaggccgaggcaggaggattgcttcagtctagtagtttgagaccagcttgtgcatcttttgtagagactttgtaaaattagctatgcatggtgatgcatgtctgtagtttcagctactcaagaaactgaggtgggaggatcacttaagccagggaggtccaagctgcagttatcatgccactgaactccagcctaggtgacagagcaataccttgcctcaaaaataaaataaaatgaaataataaaataaaataaaataaaaacccagaactgacaattttcactgttcctaatattctaatatactttagtaaattattttaggatatgttactgttttcttttcaacgtgaataaggatagaggtatgcaaagtcaaaaacctgtctgataatcaatagaattatttaccattaagccataatatgtcattcacataagcagaccaagtttgctgctcttgttgaaagatattcagttttgtggaaaaatctataaatatctttgaccttcaaagatgtaactgtaatctgtttttattgctttgcttttatgcttacatgcatgtatatttaaaaccttcctagcatattattaaagttttaaatatcctatttatattgggaaatacctgaagttgataggggatcctccttagccacctaagctgtattcatcaattattatgatgatgatgatgattattatttttgagacagggtctcactctgtagcccagactgcagtgcagtggcacaatctgggcttactgcaatctctgcctcctgggctcaagtgatcttcctacctcagcctctcaagttgctgggactataggcacacaccaccatgcccaactaatttttgtattttttgtagagatggggtcttaccatgttgcccaggctggtctcaaactcctgagatatcgagaaatactattttctttacaaattgtttgctactatttagagtcaactacagagatttttttgggtaaataatgtgatgacaaatttaaatcatttcacagaaaatacccttatttgcctttcctatttaacctacgtttttggtaagaattttgtagaaatttggaggagctcttaattgcctactatgaaggcattcatgatgaatccatggagaatttacttttgaggtggactttgaaagatgaatagaattttgacagaaaaagatgaagtaatagaagaaaaaccttgaacaaagagtgtgccaagaaggagacaacatattttctgtaaaatatgactcctattggaaagtggttagccttagcactgagaagattggctcatggtcacgtagcgtatctcccagatggaagtctaatgtcttgacaattagtcaatagaaagataaacttgttgaagattttagtgaaatcgagtgaaagctgtactaataaggacagaaattatcacacgtgaaaggagagatgggatgtatacaaattttaaatatggtaggcaaaggaaaagaagtcataaaaatacatatgagtaaatgtggagaatcactatgctataaaaattgtgattttttaatgatttgggttttgggtgattattgattagatattcttttaactttggtcgactcattttctaggcaatgttagggtatacaggtaaaaatgtcaggtagaaaatgaaaatagggggttgcagatatggagttaagaatacttcaaataataggctagtttaaagccgtggaaatagaaacgttaaataaaaagttggggaaaaaagtttaaaggcataattctggtaaatactcactttttggagcagaagaaagatgaagaactaacaagccaatgatggcaatactgctagagtttggcatgtcagagaaatcataaaggaaaatgttttaagtgagaggctgaatttaacaagctatagagatatagagaaatagtgtaaagaatatgcacatacatttttattactttagtaaataaaacggttcaggcaatttgacatttattgaataaagaaaagcaaaaatttaacaataagaacacaagaagataaaatgtagaaaagttagaattatatgctcacctcagagtaatatataccagtgtttctggtgaccaaataaatattaatgcatttcttccacacgaaactatggaggacagtttacatttctgatatccatgacatacaggtcatacttaaatttattattaattgatacgatatttgaaatattgggaagaaattcctttccttatgaagaagaaatccctagctgaaactaatgtaaggagccagacagtatgaatgcctctgcaattgataaagttaaggatttactattaaattatgataaagaaatagaaagtgcatagaagaacccagatattgcggaagtaattcatgtaatcattaccttttgaagccacatgatgtcgctgtctaccaagaagttctggttggtcaatgttcaaagtcttttctctgacagcatctgtctctaaaggccgaacaacgggagatgcagcggaattggattaaaagactctgaaagtacagtcgttcatctttatattaagataatattttctgataggaaacgactatttaacatggattatcactggcgaggagagctgggatcctggcgactactactcttgcttctgctcctcgcagcctggaaggtggggagcggccagctccactactccgtccccgaggaggccaaacacggcaccttcgtgggccggatcgcgcaggacctggggctggagctggcggagctggtgccgcgcctgttccgggtggcgtccaaaagacaccgggaccttctggaggtaagtctgcagaatggcattttgtttgtgaattctcggatcgaccgcgaggagctgtgcgggcggagcgcggagtgcagcatccacctggaggtgatcgtggacaggccgctgcaggttttccatgtggacgtggaggtgaaggatgttaatgacaacccgccagtgttccgggtaaaagaccaaaagctgtttgtttcagaatccagaatgccagactctcggtttccgctagagggcgcgtccgatgcagatgttggagctaactccgtgttaacctacaggcttagctctcatgattacttcatgctagatgtgaattcaaagaacgatgagaataaactggttgagctcgtattaagaaaatccttggacagagaggacgctcctgcgcaccacttattcctgacagccacagatgggggcaaacctgagctcacaggcactgttcagctgctggtcacagtgctggatgtgaatgataatgctcccactttcgaacagtctgaatacgaagtaagaatattcgaaaacgcagacaacggaacaacagttatcaaactgaatgcttctgatccggatgaaggagccaatggggcaatttcatattcttttaatagccttgttgaaactatggttattgaccactttagcatagatcgaaatacgggagaaatagtgattcggggtaatttggattttgaacaagaaaacttatacaaaatcctcattgacgccacggacaaaggccatcctcccatggcgggtcattgcaccgttttagtgagaattttggataaaaatgataacgtccctgagatagcactgacttccttatccttgcctgtacgtgaagacgctcaatttggtactgtcatcgccctaattagcgtgaacgacctcgattcaggtgccaacgggcaggtgacctgctccctgatgccccatgtccccttcaagctggtgtccaccttcaagaattactactcgttggtgctggacagcgccctggaccgcgagagagtgtcggcctatgagttggtggtaaccgcgcgggacgggggctcgccttcgctgtgggccaccgccagcttgtctgtggaggtggccgacgtgaacgacaatgctccggcgttcgcgcagcccgagtacacggtgttcgtgaaggagaacaacccgccgggctgccacatcttcacggtgtctgcgcgagacgcggacgcgcaggagaacgcgctggtgtcctactcgcttgtggagcggcgggtgggcgagcgctcgctgtcgagctacatttcggtgcacacggagagcggcaaggtgtacgcgctgcagccgctggaccacgaggagctagagctgctgcagttccaggtgagcgcgcgcgacgcgggcgtgccgcctctgggcagcaacgtgacgctgcaggtgttcgtgctggacgagaatgacaacgcgccggcactgctggagcctcgggtgggtggcactggtggcgcagcgagcaagctggtgccgcggtctgtgggcgcgggccacgtggtagcgaaggtgcgcgcagtggacgccgactcgggctacaacgcgtggctttcgtatgagctgcagccagctgcaagcagccctcgcatcccgttccgcgtggggctgtacacgggcgagatcagcaccactcgtgtcctggacgaagcggactctccgcgccaccgtctgctggtcctggtgaaggatcatggtgaacctgcgctgaccgccacggccacggttctggtgtcgctggtggagagcggccaggctccaaaagcgtcatcgaggcagtcggctggcgttttgggtccggaagcggcgctggtggatgtcaacgtgtacctgatcatcgccatctgcgcggtatccagcctgctggtgctcacgctgctgctgtacactgcgctgcggtgctcagcactgcccactgagggcgggtgccgggcgggcaagcccactctggtgtgctccagtgcggtggggagctggtcatactcgcaacaacagccgcagagggtgtgctctggtgaggggccaccgaagacggacctcatggccttcagcccctgccttcctcctgatctgggatcagttgatgtaggcgaagagcaagatttaaatgttgatcatggcctcaaagtaagtccatttaaatttagaactcataaattctatttgtggaaattgtagttactttaaaagtgtttcagatttagtttttcaccgtattttatagtgaaaatttaaacattgtttagtttttagaaaccttttataattaattgaattttctcagtggcataatacagtattaatcattctccacaagttgggtctatcttgaaactcaagttatggttggatgatatccattttttactgaatatttattttggcctgccttacagccgtcttctctgaacaatactctaaggacgttcagggcattttgatctttggtgaaagtattcccccaaagcgtttattcttttgtccttaggcactgaactcttaatcttactccatatgctgtactttgaaatgcatgttttaaatatgttgtctttatatttacttttattcactttaagatctcggtttattcatcttatctgactttttagtgtctggtagtcacaaatatctttggtgtttcactattgccgttttaagcagtgtagtgataaaatacagaatgatagtgtttttcaaaatttgatagttttcatattcttcctaattttattataaactagttaaaaagtaaaatcaagagggaagagatttgtaatccttcttttaattcattatttagaccattttaccatttggagacatgttttttattctacatgatttttacagttgtattgtcgccaacttaacattttttgagcctctatgtttaggaaatgattactttattcttgcaagtatcttctaaactctaatcattcaaccctttgttcatgagttggaatattttcaataatattccacattaaagtgatatttaatatatgacttagaaaaatgttttcatcagaaaaactatacatgataatttcattcttgcaaaccaaacatataatttataaatccttattatacagaatatttgggattatcatggcccattagttcgtgtaaaaatatttagtattatgggataaatctttgaaaaatccaagatactttattttggtatctttcaacattttctttcttttatttcttcttgtctttttacacgtttgcttcttgtgactgttggacctgcctggatattaaatacccattagacttcgtgcatattgctttggagagaatggtagaaattgatggaagggaatgaacgatttctgggactctgaattcttacagtttgttattagtattgttttaaatcttttaatcacttatgaacaaataatgtaatcatttatgggcatattttagcccccttgtccaactgaaggtaacctcaaagcagcattgttttgtagtttattttacagttctcttaatgcctgtccatgtttagcattttatttgactatttgaacacattgtgtaaaagcgaattgttttcattttagtcctttaaaaaatatgattgttttcatttaagtccttttaaaaaatatgattatctttattatcctgtttgaataatatgtgttttcctttgtgaaagtaatatttcctatcctgtctatgtctacctggttctcaggtattactttaattactgaattctcctaaacatttaattgacttttacaaaatatcataaataggaggattctttccaccacctagcattgtatttggcaatttatcatttaagtcattttagttctgtttttcttcaactctctgatatttgaatttggggttgtgctttcacagtgagaaagtctaaacctatttcttgtacattaatacttttcactattctaattatggtgatgcttttagctattaagaatttctgggattgaaatgtgtcagaagttagttattaagtattgtggattctgaagctctctaaatcaagtcctccctttaccaatttttgtatgtgtagccattggtaaaggatttgttattcagttccttggcattatatgtatgcatgataaatgtgaattctactttatagatttatttgtatcaagtaagttaatagttataaattattaataataaactctggcaagtgataggtacataataaaatttagttattaccattcttaagagaaaagaagttagtgattgcagaaaggcaacctaaaatgtcagaaagtcgttatggccttccatattaatcttatttttgtgtaaaactatcttctgtaaagtcattttttagattaacctaggatgtttcaatattttgaatgttgtgtggtggaatgaaaaaaatctaaaagttattacgagtttaggaaagtcaagttaacaccacctatgtgggaaaacagttttttggaaaggttaaagtccttccaaggaatgtgtagactatcttactttgatagttgtatgtttcccatatttaaaagttgcctgagatcctgcagaggcctgagtaggcgtttgagttctttgtatgtatgagatctttccattaatagtatttttcttaaaaagaagtatacaataatgttttgatgatgatttaaagtcaatttatgttgtagttctatgaattaagtaaaccatttatgtagagtgttgtaaatagccttttaaagtgctttctcttttttcttttcttttctttctttctttttttttttttttttttgagacggagtctcgctctatctcccaggctggaatgcagtggcgcaatctcggctcactgcaacctctgcctcccgggttcaaatgattctccttcctcagcctcccaagtagctgggattacaggtgcatgccaccatgccctgctaattttttgtatttttagtagagtcggggtttcaccatgttagccaggatggtctcgatctcctgacctcctgatccgcccacttcggcctcctaaagtgctgggattacaggcatgagccaccgcgcccagcctaaaatgctttcttagcaagtagagaagattgtaataaccagtcttcattaaacattaaataggacccttacagatctctaacagcatatcatcatgtcaggaattattactgagccccagcccctggctttaaaatttgaggtcaaataaagaatatgagtcacacaatgcaaggcaagataatgtaacaggtacaagaggtaaatcagaatgacgttgaagttgaaagacaatcatttcctatttgaatttttgaagaaatacttgaaggggcatggtgtgtttcagtggttttaaaataagtaagttccccccgggagaatattgagaatgatagacatttcttggaaagagaaaacataaggaaagttgaagacacagaaagcatcaatatgacaagtagaaaagtccactttggttaaaacacacagtctgcagagaatgaaagcaggaaaaccaatgtaagaagatctcttgatttctgagtaataaactaaagggccatgagtgattaaggaatttggccactctttagaattaattgggagctatttaactaccttgagcaaaataaatcacgacttttgaaagaaggttgaacgggaagacaaactcagaagctcctgcagtaatcaaggacagaagcaattgttaaatgcacctcttaggctgttatcagtagaaatacgaaataaaagataaatatgcaaaaacattaatggcacaataaacactcacggttttgcctttagacttgagatacactaaaatctagatttaattaatcgacttggacgttggaataagatagtaaaactcacaacaaaactttgtagaacttagtcaggaaaagaatctcaagcatagctttaaaaacagaaattgccccgagtactaaggatgagcaataatgaaattaaaacatattgtaataacattacacaaactatattggagactacaaagaagagattattcatagattataaagcttggaaagaatcaaaacaacacatttctggaaacagattgtataaatgctacaaaagagaaaaatatattttctccccacgcaacacaagaccttaaagtcaattctcgcttttcttgcaatattttataccttttcaattcatagaattactcaagaaaactacctcagttggttgctactttttgttgattccttttaccagacatgactaagtttctttttcatcagtagatttctgggctcctatattcactagagattgcaactcctggatttctcttacactagaatcctatttcgagccatatgggagattctgaattccagaacaaaagaattttgtaatttaaaattcgtgattgctcaatggaatcattttaattgttacttcatttctgtcgttatttaaaacttaagtggagagttttctcagggataagaaaaccacaatcaaggtcatacaaaacttttagaggcagtcagtctgctaagaaggctccagcaagagaaacgggatcttctgtttcaacaatcattacttaagaaaaaattaagaaaatgaaataagttttgcagaataactgtgaaatttttattcatgaaatatgtacttacactttgggccacgtgatgtcactctttgccgcgatgttctctctgaatccagacaaatacagcccttttcccatgggaaagaggctcaattctttttcactctctctgtgctgaacgatggcgaacacagcagaatgggactgacgaaatcagatgatttcttctaatttggaggcaattttcactaattagaagaagactgagtatttgaaatgttatactcaagtcgaggagatccagagggtcagcctctactgctctcgcttctgatcctcgcaatgtgggtggtggggagcggccagctccactactccgtcccggaggaagccgaacacggcaccttcgtgggccgcatcgcgcaggacctggggctggagctggcggagctggtgccgcgcctgttccagttggattccaaaggccgcggggaccttctggaggtaaatctgcagaatggcattttgtttgtgaattctcggatcgaccgcgaggagctgtgcgggcggagcgcggagtgcagcatccacctggaggtgatcgtagacaggccgctgcaggttttccatgtggacgtggaggtgaaggacattaacgacaaccctccagtgttcccagcgacacaaaagaatctgttcatcgcggaatccaggccgcttgactctcggtttccactagagggcgcgtccgatgcagatatcggggagaacgccctgctcacttacagactgagccccaatgagtatttcttcctggacgtgccaaccagcaaccagcaggtaaaacctcttggacttgtattacggaaacttttagacagagaagaaactccggagcttcatttattgctcacggccaccgatggaggcaaacccgagctgactggcaccgttcaattactcatcacggtactggacaacaatgacaatgccccagtgttcgacagaaccctgtatacggtgaaattaccagaaaacgtttctatcggaacgctggtgattcaccccaatgcctcagatttagacgaaggcttgaatggggatattatttactccttctccagtgatgtttctccagatataaaatccaagttccacatggaccccttaagtggggcaatcacagtgataggacatatggattttgaagaaagtagagcacacaagatcccagtcgaggctgtcgataaaggcttcccacccctggctggtcattgtacacttcttgtggaagttgtggatgtaaatgacaatgctccacagttgactatcaaaacgctctcggttcctgtaaaagaggacgcacaactggggacagttattgccctgattagtgtgatcgacctagacgcagatgccaacgggcaggttacctgctccctgacgccccacgtccccttcaagctggtgtccacctacaagaattactactcgttggtgctggacagagctctggaccgcgagagtgtgtccgcctacgagctggtggttaccgcgcgggacgggggctcgccttcactgtgggccacggccagggtgtctgtggaggtggccgacgtgaacgacaacgcaccagcgttcgcgcagtccgagtacacggtgttcgtgaaggagaacaacccgccgggctgccacatcttcacggtgtctgcgcgggacgctgacgcgcaggagaacgccctggtgtcctactcgctggtggagcggcggttgggcgagcgctcgctgtcgagctacgtgtcagtgcacgcggagagcggcaaggtgtacgcgctgcagccgttggaccacgaggagctggagctgctacagttccaggtgagcgcgcgcgacgcgggcgtgccgcctctgggcagcaacgtgacgctgcaggtgttcgtgctggacgagaacgacaatgcgccggcgctgctgacacctcggatgaggggcactgacggcgcagtgagcgagatggtgctgcggtcggtgggcgccggcgtagtggtggggaaggtgcgcgcagtggacgccgactcgggctacaacgcgtggctttcatacgagctgcagccagaaacggccagcgcgagcatcccgttccgcgtggggctgtacacgggcgagatcagcacaacgcgtgccctggacgaaacggacgcaccgcgccagcgcctactggtgctggtgaaagaccacggggagccagcgctgacggccacggccactgtgctggtgtcgctggtggagagcggccaggcgccaaagtcatcgtcgcgggcgtcagtgggtgccacgggccccgaggtgacgctggtggatgtcaacgtgtacctgatcatcgccatctgcgcggtgtctagcctgttggttctcacgctgctgctgtacactgtgctgcggtgctcggcgatgcccaccgagggcgagtgcgcgcctggcaagccgacgctggtgtgttctagcgcggtggggagttggtcgtactcgcagcagaggaggcagagggtgtgctctggcgagggtaagcagaagaccgacctcatggccttcagcccgggcctttctccttgtgctggatctacagagcgaacgggagaaccctctgcttcctcagattcaactgggaaggtgggtttttctagcattttatttatttatataattttttttcttgaaagatattatcgattactcccaggggccgttcaaatagttttattcatttttctagaaatccagcagattttttttctgataaagtaaaccccttaacattggagccgactttgtcttgacttctagtgagaattataaactgtatattaaatagatattttttgggtgctgaatcaattttatttaaatttgtgattaaagtgacattgaatttctgatgctatgctgccataacacttgaaaaccaatttagttgttagtcattcattaaacattaacatcactatcatttatttattgctaaatgatgcatagtattttagtctacttgtattgtttataagaaacccaagcaaaaatatatagcaattgttaccttgttaagtttgtagttctctacatttctctggatggagactgtgaacatctgattgttcagcaaccttcagtatctattattttaataagaaagaaacttcccctaaactttagaaaacagttgctccactttaggaatcaaattatgtcaataaatgttataaacacagccttcatttcaacttatataaaatatgttttaaaatgcctgacaatgtagataattcaagaaatgttgactgaaattttgtctacacttagaacattttttgaaattcagtttacagaaattggagaaaatgctttttaaacaagtgtttcctttcttcaagaagatattctccttttaattgaaattttctccattcagtgataaaatgatcagccatgtgaagattcgaaacttcgagttcttttgaaattcagagtctgtaacttaaaacattacccttatgaatttagatgagaattcacttgttctgtcagtaatccataagacagaaatctgtttttttaaaaatatctttttctcctctcagctcatacataacacaaggcagaaatctggatatgagatttgcctctttaatgtcactacatgttatgtttcctgaattgtagtatgtgactttcaaaatggtggttttccacactctacctttagtgcaagctatttgtttgttttctaatttatagttttaaaaacttcgcttattgagtttttgttatgtggtttatatttttctttctctttcagctattttatttaatattgtgtcagatattttacaaggtatgacctaattaaaaactcagtagagaaagatcagaatggccttgagaatagagccacaaaaataactatgaaaatgccagtaacgtttatttaaaacaaaatattttaatttttaaattttcccttaaaacacacttttggaatatgctacaatattacatgttttttgtctttttatttttctgagacggagtcgttttctgccacccaggctggagtacagtggcatgatcttggctcactgcaacgtctgcctcctgggttcaagcaattctcctgcctcagcctcctgagtagctgggattataggcacatgccaccgcgcccagctaatttttgtatttttagtagagatggggtttcatcatgttggccaggttggtctcgaactcctgaccttgtgatgctcccacctcggcctcccaaagtgctgggattaaagctgtgagccactgtgccaaggcttttttattttttttttttgtcattttctttcaaaacttgagtggtctctgagctcctgtcattaaacctatctatatctgtctatcagcacaactcaccttgaatatagtcttatactttcaagtatctttgtctttgcacgtttttcaagtttcatgtgccatttaaacttggacccaggtatctgattatttgatgtgaatagagggatgctacagatgtcatttgtctcccgccctaagtcctccagtctccttagagctagtacttactaagcatttactatgtcatcaataatcataaaacgtatttttttttttgagtcagagtctcgctctgttgcccaggctggagtgcagtggtgccatcttggctcactccaagctccccctcccgtgttcacgccattctcctgcctcagcctcccgagtagctgggactacaggcgcctgccaccatgcccgcctaatttttttgtatttttagtagagatggggtttcaccgtgttagtcaggatggtctcgatctcctgacctcatgatcctcccgcctcagcctcccaaaatgctgggattacaggcgtgagccaccgcgcctggcctaaaatgtgttctttattattgacggctgtattgatgggattggtaatttagtccttcatattaatctctattctctctcagagtacaagctctcatcatatgcaaattctcagaagggctgtgaacaccttagtaataaatttatcttttgaggtcattagcaaacatgaactcacagggatccagagatggtaaaattcaaaacagcctgtcaagttcaaaacagagaggtgaaagcagaagagacactttcctattttgcctaataggtctccttatatgcatctgtagttaacattcctcaattcaagttagaatcatgaaacaataatgaagctcctcctatgtctcttttcaagttgtaattactatataggaaaaactaagttgtcacccaatatcttagacactttgagagcaaagggggtgctgtaaataagtatacaagatcacagacctaaattgagcctgttccagacaaattggggcctatggtcaacctatccttagacctgctaacgcattagcattagcagcacctaagtcctcattgaatgttctggttcaaggctccacctcagaaattctgaaatgggtagtaagagcaaattttcattttaaagcacacctgagatgattctcatacaaccgaaattttagatccatagccctatttgatacttgacagtgcaagtttctgtaatttaaaaagatgtggtggcctgacacctgcaatcccaacattttgggaggccaaggtgggagggtcccttccttgagcccagcagtttgagaccaatgtagtgagactcatctctgccaaaaaaaaaaaattagccgggcatggtggcacacatctctagtcccaattactcaggaggctgaggcgagagaatcgcttgagcctgggacattgaggctgcagtgaactgtgatggcacaactgcatttcagcccgggagacagcaagattctgtctcaaaaaaaaaaaaaaaaagagtagtttaactactccctactttttattcaatattggacatctacattgggatatttatgttatcacttggtataaaatgtacattagtagaaattgagtttagtttttattattttgtgcgtggagatgattgatcaatggcaaacttattttacgctccagatagctaaaacaaacgttgatattttgatacataactcattacattttaattcagggtttataaaaaagtaatctctaaaatcagaatttgaatgaattttgatgcaagaggcattccagaggagtagagaagtatagaaacagaatttagtaggacacataaactgatggattaagtgacacccatttctgtcagttttcttattcataaatattgttgctctgtcattcagattttaataaaaaaagtttaaagtaattgacacatttaaaaatattctttagaaaagtcaaaacatcattaaataaaataaattaacccttgcataagaccaatatgtctgttgttaagttttcctttcttggaaagacagaaaactcaagtttttttcagcagcacagatatattacattttcattcctgaatatttgatttcaagaactttgagagagaaaaaaatatttttactgcaagtggtgatgaaaaacttcactgacattgataaaattactagatatatttcagaactgtgtcttttgggcatttgaaaagcgtaaatataacagggttgaaagcatttgcctctgaaagcagaaataataaatttcttaattactttattcagaattataattaagattctttttgcccgtgtaagatattataaaatgaaacttcttgtataaaggatttttctgtaatagtacttttctgttttcttaaatacagaaaccaccactctcagcctgtgcagtagcaataattaaggcattctataggtaataattttgcctgatgagccaaatttggtattgagcctcatgaaaacaaatgtggccaaattgaggcctgagaatagtttccatttatgaagcactcattctccttaaggtactattgcaagcacttactatattataattcactcaaccaccgtattactattaggccaaagttataaaattggaacatgagggagggagaggttaaacgattttcccaagtcatgtggctagtgagtaggataataggaatctaaatggagaaatgtctgatgttgaagctaatgatctctaaattctagtgatgactagatcttcggagttataaacacctcacagatagttgatgcttgacattagtgtctaaataaaccttattaaatctcaaaataatgagaaagagaagtaagttaagtgtcagaacttaaatggaactaaagttgtcatttaataaaatattagtatactcagtagtatgcaaatattaagggcattttgaaattcggctattgataatcatgtggttagggaagaaatcactactctgagagtctacatttaagaaaacattgcacgtgggatcaacatttattgttattaactataaagagacgtaatgtgaggctttgaaagtccatagacataaaaatacgtaaaaaaagaattaacatatgaatgaaagaaaagttgtgaactcatggaatcgtacttacacctaaagccaccggatgtcgctgtcgtccacaaaatagctttttagaacaaaggcatcagccagtttctcaaggactaggaagtagcgtcattctgagatctcagccatttcgataaaaaatagatataagaaataggacagaaaatgtcagatcgtatgtgcgttctagaccgctgattcgtcgatttgtaaaacaagagaaggataagatggtttccagatgtagctgcctgggggtccagtgtctgctgctctcgcttcttctcctcgcagcctgggaggtggggagcggccagctccactactcagtctacgaggaggccagacacggcaccttcgtgggccgcatcgcgcaggacctggggctggagctggcggagctggtgcagcgcctgttccgggtggcgtccaaaagacacggggaccttctggaggtaaatctgcagaatggcattttgtttgtgaattctcggattgaccgcgaggagctgtgcgggcggagcgtggagtgcagcatccacctggaggtgatcgtggacaggccgctgcaggttttccatgtggacgtggaagtgaaggacattaacgacaacccgcccaggttctccgtaacagaacaaaagctctcaatacctgaatccagactgcttgactctcgatttccactagaaggcgcatctgatgcggatgttggagagaacgcattgcttacttacaaactcagtccaaatgagtattttgttcttgatattataaacaaaaaagacaaagacaaattcccagtgcttgttctgcggaagctgctggatcgtgaagaaaatcctcagctaaagttgttgttgacagcaactgatggaggcaaacctgaatttaccggatctgtttctctgctgatcctggtgttagatgccaatgataacgcccctatctttgacagaccggtttatgaagttaagatgtatgaaaatcaagtgaaccaaacattagtaatacggctcaacgcttctgattcggatgaaggaataaacaaggaaatgatgtattcatttagctctttggtcccacccacgataagaaggaaattttggataaacgaaaggacgggagaaataaaagtaaatgatgctattgactttgaggacagtaacacttatgaaattcatgtagatgttacagataagggaaacccacctatggttggtcactgcacggtcctagtggaactactggatgaaaatgataattcacctgaggtgattgtcacttctctgtctctcccagtgaaagaagatgctcaagtgggcaccgtcattgccctaatcagcgtttctgaccatgattcaggagccaacggacaggtcacctgctctctgacgcctcacgttccgttcaagctggtgtccacctacaagaattactactcattggtgctggacagcgctctggaccgcgagagggtgtcggcctatgagctggtggtgaccgcgcgggacgggggctcgcctccgctgtgggccacggccagcgtgtctgtggaggtggccgacgtgaacgacaacgcgcctgcgttcgcgcagtccgagtacacggtgttcgtgaaggagaacaacccgccaggctgccacatcttcacggtgtctgcgtgggacgcggacgcgcaggagaacgccctggtgtcctactctctggtggagcggcggttgggcgagcgctcgctgtcgagctacgtgtcggtgcacgcggagagcggcaaggtgtacgcgctgcagccgctggaccacgaggagctggagctgctacagttccaggtgagcgcgcgcgatgggggcgtgccgcctctgggcagcaacttgacgctgcaggtgttcgtgctggacgagaacgacaacgctcccgcgctgctggcgtctcccgctggcagcgcgggcggtgcagtcagtgagctggtgctgcggtcggtggttgcgggtcacgtggtggctaaggtgcgcgcagtggacgctgactctggatacaacgcgtggctgtcgtatgaattgcagtcggcggcggttggtgcacgcatcccgtttcgcgtggggctgtacacgggcgagatcagtacgacgcgcgctctggatgagactgactcgccacgccagcgcctactggtgctggtgaaggaccatggcgagccgtcgctgacggccacggccactgtgcttgtgtcgcttgtggagggcagccaggcacccaaggcctcgtcgcgggcttcagtgggcgtggcgcccgaggtggccctggtggatgtcaacgtgtacctgatcatcgccatctgcgcggtgtccagcttgctggtgctcacgctgctgctgtacactgcactgaggtgctcggcggcgcccaccgagggcgcatgtgggccggtgaagcccacgctggtgtgctctagcgcggtggggagctggtcttactcgcagcagaggcggcagagggtgtgttctggggagggcctgcccaaggcggacctcatggccttcagccccagccttccaccatgcccaatggtagatgtggacggggaagatcagtctattggaggggaccactctaggaaggtgggttattacgttttcattttccttttgtgctttatgaataatattttctcttaccgcattttctcaaatatgtatcagaatatttcatttttgtctacattccatttatgcttgaatatttctagtgatacctttgtaatataatttattccaggagttttaaaatttttttatcctacccagtgtgtcagcctttgattggtacttaaatttttttaaataacaatttattctgaatacactaatattttccaatacaaatatgtgatataggttgcagttctgacgatttactttcataatcacttttcgttacaaatatttgtgagattagtacttcatgttatttcatttccaatctaaattttgatttgattgtatttgcattaccaaaaaattccactgatctatatctcttcagtgaaaatgtgttttcctccatgtgtagaatatgtgtagcgtaccacagcttatactgccatagtagatttcaatgttcagtgattacagctttttctcaatagtgcagtaagtaggtgggcagttcattggtaaaaatttcttaatcttagcaattaagttaaatgctttgaactttaaaaacgttttccatttttattttagttgtagtggtacctgtgtcagtgtgtattattcacttagcagaagaaaatgtatgtttcttttatttacataattttatccagtagctcttcattatctgctcctttatcagcattaggcattgcttatgatattcaggtattagctctttcactttaaggaaggagtcatgcttatgtttaataatgaagagaatttgaacactttttacttttgagactgaaaatactttagtatgaattaatattaaaagtttgaggagaaaataaaattaatgttttctactgatctgatatattgtatagtttaatagcttctctagtcatcttaaacagggttgggttagatgatatagactcagaaatgaaagctaacttagttgcagagtgacaaaactacactatcaattgtgttttcctgaaattggttgttacctgatacccatgatttcatttttaaaaaaaatttattaattctagtgttaccaaacaccaatgccatgaatttgtcatcttgcctatggctcttagcaattacttttttctttcctttctctttgagtatggagattgaatttgttactcagtacgtgcttcacaaatagcttcaaataaaattaaaattattgttcaagtttaggaacaccaaaaaaaaattgtggcaagaatttaagcatggcattctttcagtgttaatactctccatgccctgtctccagctcttagaaattatagatgctaagttaatgcagagtttagaagtgtatttgttattttatcaaataggtttatgaaatatatacttccccctctgatattttgaaaaaaaatcttccttaatgtcttatattataagtaatataaaaaacttagtaaaaactcatatcaattgtaaaagtctcaggtatacaagtgcattaatctctccatcaatactaacttaaggccaggcatggtggctcacacctgtaatcccagcattttgagaggccaaggtgggaggatggtttgaggccaggagttcaagaccaacctgggcgacatagggatatcttgtactgtgtgtgtgtgtatatatatgtatatatgtgtatatatatatgtatatatatatgatgggctctccttacatatatatctatatatgtacttatgtatatataagccaggcatggtggtacatgcctttagtccctactgtagtgctacttgggagggtgaggtgggaggacggcttgagcctgggaagttgaggctgcagtgacccatgattgtgccactgcactccagcctggatgacaaagtgagaccctatttcaaaaattgaaaaaagcaaaagcaatagtaacaccattatcctgcaaatatgatctttttcatattaattcacgtgataatacagttggtgcagtagtactttatttaggatgtctacatacaagataaaactcttcatggaattctgatttgtaagacaaacccacctttgaagaggtactgatcatacacaagaaggtataggaaaggagttggaagctcacaaagagaaacataaacatatgcaggaatcaggaacgaagaagataagtgaaataatatgaaatcaaatgcacttatgttttgagcgacaggatattgttgttctccatgaaaagtttttttggtttttttgttttttattttttatttttttgagacggagtctcgctctgttgcccaggctggagtgcagtggcacgatctcggctcactgcaagctccgcctcccaggttcacgctattctcctgcctcagcctccggagtagctgggactacaggtgcccgccaacacgccaggctaattttttgtatttttagtagagacgaggtttcaccgtgttagccaggatggtctagatctcctgacctcgtgatccaccggcctcggcttcccaaagtgctggccgagtgccaccgcacccggccgaaaggtattttttttaacagaagaaaatcagattattcctagatcagaaagaagctccattgttcctgtactttaaaaactacaaacacccattaagaccacttggaacctcaggaacaaggaccaaaaggtctcagaggaactaagtctttctagtcatgaaatattgttttactaaccaaaagagaggcataattttagctgctagacaaagtggccaggaatcccggagcctacagcactggcttctgctccttgaattttgtgaagcgggaaaggaccagttccactacaccatcctggaagaggccaaggacggcacatagcgtcttcgcggtccctattgcgcaggacctgggtctggagcttgtggagctgataccgcgcctgtttcagttggattccaaaagccgcagaaaccttctggaggtaaatctgcagaatggcatttttgtgagttctctgatagacctcgaggagctgtgtgggaggatctcggagtgcagcatccacctggaagtgatcgtggacaagctgctacaggttttccatgtggaggtgaaagtgaagaacaataaagacaacctgccagtgttctcagcaacacaaaagaatctgtttctgaaacgagagctcttgattatcgtgtttcactagagggtgtctgtgatgccgacgtcggggccaatgctctgatgacttacatactgtgccgcaatgattatttttccctggaaataccaagagcaggtaaaaccacttgaaggtgtattttaaaaattctttcagataggtaagtcacttcagagctactcttggtgctcaaagcaactgatgggggcgaagctgagctgacaggcaccaaagcattatatatcacagcgctggatgtaaatgatgatgcccagtgtttgacaaaggagtctatcatgtgaaattactggaaaatgcaagagaaggtacactggttattagacttaaccccttggattttgacgagggttcaaaccgtcacattgtttctttgcaactgatgtctcccctaacatagaagccctttttcgcatagattcagacagtggataaataaatgtaaagataggttttgaggaaactaaataatgaaagattcaaatacaggcagttgacacaggcaattccccaatgtttgatcactgcacagacttgatagaagtcttggacatcaatgatagtgttccagagttagcagtaagtcactatcattccctgtacaggaggacgctccactgggtaccgtcatagccctaatcagtgtaattgaccctaacttcagtgccaagggacagacgacccgcaccctgactcctcacgtctcttcaagctggtgtctaccttcaaaaggcgctgcccagaaactattcgttggtactccacagcgccctggaccaagagagcaaatctatccattgttggtaatcgctcggaatggggactcgctttcattgttggccacagccatcgggtccgtggaagtggccgaacagtgaaccacaatgccctggcgttccagcagcccgagtacatggtgttcgtgaaaggtaacaacccgcggggctgccacgacttcacagtgtccgcgcgggaccgggacgcgcaggagaacgtgctggtgtcctactcgttgatggaacagcgggtgggcgagtgcgcgctgtctagctatgtgtgggtgcacgcggagagcggcaagaggtacgcgttgcagccactggactacgaggagctggagctgctgcagttctaggtgagagcgcgcgacgcgggcatgccgcctctgagcagcaatgtgacgctgccaggtattagtgctggaacgacaactttgtctgcgctgctggcgccttgggtgggctggcggcgctgtgagtgagctggtgcggtattcagtggatgcaggccacttggtggcgaaggtgcgcacggtggactccagctatgacgcctggttgtcgcaacagctgcatctgtcagctggcagcacccgttccacgtggggctctgcacgggcgagatcagcacgacgagtaccctggacgaggcgaaagctacgcgccaccgcctgctggtgctggtgaaggaccactgcgagctggcgctgactgccaccgtcaccgtggtggcgtcgctggcggagagcagccaagcgaggaaggtcccatcgcgggctttggcgggcgtcgaggtccgggaggcagcgctggtggatgtcaacgtgtacctgatcatcgccatctgcgtggtgtccagcctgttagtgctcacgttgctgctgtacacgacgctgcggtgcttggcgcagctcaccgagagctcgtgcatgccgggcaagcccacgctggtgtaccgcagcgtagtgggatctggtcttactcgcagcaaaggagattttactctggagagtcgcctcccaaggtcaacattacggcttttagtcctagtgttctcccatggttcagattttggagatggacttcaataggaaatttttgagaatataagtactgtaatcctggaaagtatttcattcctattaatgtccctcatagtgacattgataatgttcaccaagttattaatttgattgctttatttattttgcttttgctttttcttttgagatgctttatttaaagtacactggggccgggtgcggtagctcatgcctatttgtaatcccggcactttgggaagccgaggcgggcggatcactcgaggccaggagtttgagaccagcctggccaacatggtgaaactccatctctactaaagatataaaaaaattagctgggtgtggtggtgcgcacctgtaatcccagctactcaggaggctgaggcacaagaattgcttgaacctaggaggcagaggttgcggtgagcctagattaggccactgcactacagcctgggagacagggtgaaactctgtcttaaaaaaaaaagtacattggaagtctagccatcttaatcactttttactacagtcaccatgaacattctttaggaatattcttcagttgataagtataatgataatagtaataatgaattagactgagtggctgtttcctgtaaatgagaaagttaaatcttaccggaaggatcatgatgaataatgatccttatgagaaggtcaaatcttctcaattttgaagcaagttctttattcctattcattttcttattctgatttgtgtcctccattccttattgtttttatgtattcaaaaataccatgacaatatttaatatcataattatttgagtttaaaacatgtttaaatgtttatctttctataatcgataagtttatctctcacaaatggtgatgagcagggttgaggcagcttcgtccacaaacaattttgtttcttcatgatcaatatccatcttttttgagatgttgattgcagtgggtggaattttagccttgcctttaaaggtgattttacttcttaatttttgtcttcaatcttcttataatttcattttaggtcattgtcttcacaatcttcaactacttcagatagccaacaactttgttcttttttaaaaagaaaacaaaacaaaacaatgtcagctctacttaattacctgttgacttaattgctgctgtcctccagtttaagttgttgagctcttctactattttgggaagatttctttgagcaccgattatactcatttttctttcatttttggtacctggctgtatgaaaatattttagggtaggaaaattcacacttatttgggctttaagtataagagagtcttcccatacatgatgaagggtgataccattgtctgtgttcattaagctgcatggtcttcagaatggcattgctgagcttggcagggtgtctcaggcctgtaatcccagcattttgggaagccgagggaggaggatcgcttgagaccaggagtttgagaccagcctcggcaacatagtgagacccccatctctaccaaaaaatgtcattgtttttaataacttaagtataagaaccatgggatattaataaaggcacttccacttgacaattgtggtgttaattataccttagaatttaacattgtatacttttgatatatttgatgcaaaatattttttgccttcacaccatattaatgtgaattgctttctttaaagggatcccagagaacacgtatttatagctgtaaggatgtgtatcaaattatatgtaaaattactttgctctttttggctctaattacaaatgagatggcctttaattctgtgtaaagaaatagtatatttacatattgcaggataaccatgttataggtagggtaaagttaatataaatgctgaaaaggaattagtagtgtctacctagaaaaataacttctgagaagatgatttctatgaagataaacattaaggaaatcttcagaaaagggaaaaccctgtcctactttatggtgctggaattctcttcatccatagctataggacaagagccaatattgatcagtaactcatgataataaatcaccattgtttgagcagtttattaatatatttgttagacatcatgaagggacttaaatacattatttcatttaatacttataacaatttctaaagtacatatgactgttccaatttgaaagataaaataagagaagctgagatgtgtatctattttatccagtgccagtacatggtggagatattattcaaatgtgtatctttcaggcttcagactcattcttttatccactataatgtagagctttctttagtaagtcatttctctgctcaaacatggtctcggctaggaaaatcaagcacaaattgtgtacaggcaaatctttctttctgttgtgcttagaagaaacttcatgattgtcttcatcattaattttgtacaatgtgtgattgagatggcactaagtttttttatgttaagtgatttttttcttgtaagagttcgtgatcatcattatcatttgttttaatcaatgccacactgagataggtattttggttatgtaattgttaagtaattaagagttgccttataagaactacgtatctgttgtttggaagtgatataagtaagaatcgtttaacatgtaagaaaagtcagaaaactgtggtttccaatatccttgtggaacacctaaactaaatactatataccaaaaatgacacccttctttctttactgtgaataaagacagtgtttgggacaagtatagatgttgatattattatttcagggaccctgaacttggccaaaggattcaagaaatgtttacaatattgcatacttcaataacaattttaaagacatagattcccatgaaaatcttcaaatgtgtgtaggtctttcagtcttcttcagtcttattgttggctgggaagctcataacaactgacaaatgatttgtgaccaaataactgtttttacttgactaagccatgatagagcagaattagcatcacggaataaatcctataattttgttaatacagtggttggataatgtaattctaatctgttggttttggagaacctcctggggttctgacaacggtgtcaaaatttatttatgtgttttcaagaaataatagcactaggtctgttagaatatcagtggatgacgtgcactagtaagacattaaactatgcactctaatacttatatgactaacaggacatacaggcagattgtatgtcctgactgatatagtaaaagtcaggcacaaagttccttaatcttcaattgattttacaaaatcagttaacaataactgtattgaaatgacttcttggtattagcctatacccagatattaggctgatcctcaaagatgagttcaaagggcgcataatctcttcactaggggctggttgagatggtgacatctgaaatatcacagccaaaatgcaaaagatgggtcattgattcatacactatatcaaactcttttatgacttggcgtttgttcagtactactttatatattcacaaaatactgtattgttggaaattaacacctaaattaacatattgttttaattcaaatatgtgatattatcatttttccagagtaaaccttctaaggttcatttccctacctcgcaagactccacattccatgtaacatcttcatccccaattcccataataaggtgattgaggatctgttgtttccttttgttcaaaataaacctgatgtgcttcaaatatcatgttgaatatactgtcatctggtctaatgttatgttttgattagaggctactatgattgattattttacagatgcgtaatggaattaacggttataaaagttgatatgtctcctttaattttttaatacagaattttgcatttacctgaattagagttctagtgttatgacaacattgggaaaagagtaaatatgaaaaaagtagaacaaaatctcaaattaatagttgaatatatatataaaatattagcatacacatatgataactttttcatatgcccttgcagtatttttagattggagataaaccatcaaaactatagaacaaaatatttaagctagagtgatatttattctaaatcactttctactctaaaattttgttgcatcttctttttttcctcctaaatcctaagggtatatgaaaagacaaagaaaattcaagcaagttacaacttcaggcaaagaaaactctcataagcaattcctgtattttacttagcattttctatgaaattccatttccacaagcactaaggtaatttaccatttagttgaattgtttgattaattttctatgttttaagcacaatatcaggtacttacagaaggtataattaaaaatcacttcccttgttttccatgaacttctgctcccaaacccaaaattctttcaacaagaaacaaactattttcatgaatataactgaattagattaaggaaaccaatgttggtgacttggaaataccaatatggcacaaagatgttcagggtgattttatttattttataaaatgataataaaatttattttatagttgaaaagcctatttctgtcatatcattgattctgttacataaagtgctaaattttgatatctcatattatgctactatggcttacattagaaataatatatgtcaaataaaaactcatctagatcaatagacttttcctttgtggattcttttttaaaactaccaagtttgagaatatgaatatatttgtttttcatattgttctgcaatgaatataaagtcacttataatcagaaagcaattaaatgtaaataacagtaaagaatgagaactatagaaaatagatatgaaaatgcaagcccacagagatgagaatagatcatgtggaacataaacactaaagagctgcttttataaaacttcaattttttctttgagttccctagcagccaaagtaacaagggagactgaaagtaaaacaattcaaatttgatagtatttttatatgaggaacaacactttcaggaaatgtttaaccctagtttttcatgaggccaccttaacaactgaattctctttctctctcactctgtgtataagtattttagataagtaaaagaacaatgttataatgttaagtcaaacatagacacaataatttaaatttgatgttaatcgagaaatacaatgccatttccatatatatttagtttcaatatgacttataatctgaatattccataaataagcacgttggaaatatttgggggaagaaacccaaaacacgtgaaattctgtggtggtaaatgcagtgcacagtactcacagttttaggcgcaaggtgtcgctctttacttggtggaaagttcatttaaaggttggtctgaacagtgaggcactcccatacaaaggaactccatcataccggatgccaccgtttaaggatcctttgaaacttcttaagaattcaacgagatttttaacctgaaactgaagaatctggtactgtaagtgtaaagaagcttattttggaagccaatttcgtatgcgatgtttggttttcagagaaggggattgggcaccccacgactacagctctggcttctcctcctcgaattctgggaggtggggagcggccagctccactactccgtctcggaggaggccaaacacggcaccttcgtgggccgcatcgcgcaggacctggggctggagctggcggagctggtgcagcgcctgttccgggtggcgtccaaaacacatggggaccttctggaggtaaatctgcagaatggcattttgtttgtgaattctcggatcgaccgcgaggagctgtgcgggcagagcgcggagtgcagcatccacctggaggtgatcgtggacaggccgctgcaggttttccatgtgaacgtggaggtgaaggacattaacgacaacccgccggtgttctcgctcagagaacaaaagctgctgattgcggaatctaagcaatcggactcgcgttttccactagagggagcttctgatgctgacattgaagagaatgctctattgacctacaggctaagtaaaaatgagtatttttctttagattcaccaacaaatggtaagcagattaaaagactgtcacttattttaaagaagtctctggatagagagaaaactccggaacttaatttgctgctaacagctacagacgggggaaaaccagagcttactggcaccgttcggctgttagtccaagtcttggatgtcaacgacaatgatccagagtttgataaatcagaatataaggtgagccttatggaaaatgctgctaaagaaactcttgtgctcaaactaaacgccacagaccgagacgaaggagtcaatggagaggtaacatactccttaatgtcaattaagcccaatggaagacacttatttacactagatcaaaataatggagaagtgagggtcaatggaactttagattatgaagaaaacaagttttataaaattgaagtacaggctacagataaggggactcccccaatggcaggtcactgtacagtctgggtggaaatcttggacaccaacgataactctcctgaagtcgccgtgacttccttgtccctcccagtacgagaggacgctcagcccagcacggtcattgccctgatcagcgtgtctgaccgtgactcaggtgtcaacggacaggtgacctgctcgctgacgccccacgttcccttcaagctggtgtccaccttcaagaattactactcgttggtgctggacagcgccctggaccgcgagaacgtgtgggcctatgaactggtggtgactgcgcgggatgggggttcgccttctctgtgggccacggccagggtatccgtggaggtggccgacgtgaacgacaatgcgcctgcgttcgcacagcccgagtacaccgtgttcgtgaaggagaacaacccaccaggctgccacatcttcacagtgtcggcgcgggacgcggacgcgcaggagaacgcgctggtgtcctactcgctggtggagcggcggttgggcgaccgcgcgctgtcgagctacgtgtcggtgcacgcggagagcggcaaggtgtacgcgctgcagccgttggaccacgaggagctggagctgctacagttccaggtgagcgcgcgcgatgcgggcgtgccgcctctgagcagcaacgtgacgctgcaggtgttcgtgctggacgagaacgacaacgcgccggcactgctggcgactcaggctggcagcgcgggaggcgcagttaacaagctagtaccgcggtcggtgggtgcgggccacgtggtggcgaaggtgcgcgcagtggatgcggactcaggctacaacgcgtggctttcatatgaattgcagccggcggcgggcggctcgcgcatcccgttccgcgtggggctgtacacgggcgagataagcacaacgcgtgccctggacgaggcagactcgccgcgccaccgacttctagtactggtgaaggatcacggtgagccggcgctgacggccacggccaccgtgctggtgtcgttggtggagagcggacaggcgccaaaggcctcttcccggactttggcgggcgccgcgagcccagaggctgcgctggtggatgtcaacgtgtacctgatcatcgccatctgcgtggtgtccagcctcctggtactcacgctgctgctgtatacggcgctgtggtggtcggcaacgcccactgagggcgcgtgcgcgccggggaagcccacgctggtgtgctcccgcgcggtggggagctggtcatactcgcagcagaggcggcagagggtgtgctctgaggagggcccacctaagacggacctcatggccttcagccccagtcttcctctaggtctgaataaagaggaggaaggggaaagacaggagccagggtcaaatcaccccggacaggtgagttttctacagattccacctatcaggaagtgtatgtgaaattatttaaaatccagttttttttcacggattttttaagggaaagttttatgaataaccagtgttttgaatattgttttagataacaatgtctgttcataaaataccaaatgatacacatcttcagtcttttaatcatatgaataatctggcttctttaaccaataaatgtcctatttctcttaatatttggttagcaaatcctaaaagaaatgagatgcaagagtgactcttctgtagtcacttgagtagaaataattactattttcactaaagtacccatgccccttcatctctaaacttcaattatgaccataataactatggattatttaaatttgctcctctttgtcttttagcagagttttgccttgatatttccacattgttagatcaactggctttgtttttctaaagggaggaggtcttcctatgatgtccaggttggactgcagtggctatttacaggtgacctgtagcctggaactgctaagctcaaagaattctcccacttcagcctccagagtagctgggaatgcagtgccactgcacttagtccattggctttcctaacttcaggcttgtatcaaagctagaatactccattagtatgacatgatttacttttcttttttttttttacagtgttaaacgttcatcataaattcattatatatgaaacaatctttacttttgtctttattcctgtgataatacttgttttcatattgtttgaagaaaaaagttaagccttgcattcttatatgctgctttatggaaataatatgactaaaattctacatgttcttgccaggcaaagtggttcaggcctgtaatcccagctatttgggaggctgaggcaggagaattgcttgagcccaagagttcgaggcctgcctggacaacatagcgagatcctgtctctataaaaaattaaaaaattagccagacctagtggtgcatgcctgtagtcccagtttcttgggaggctgacatgagaggatcccctgaacccaggggttcagggctgcagtgacctatcatcgtgagacccccatctgaaaaaataattttttttgcctgttcttgattttgttccatgaaaaggcaagagatttgtcaactattggatactcaaacaaaatggcatgatttatgattccaaaggaaactaggtaaataaaattattcaaattatctaaacttgctaaagacatgcatatagggctatattatctataatatatgctagttggcattcttccataagtttttcagattcatctagcagagaaaaaattaaatatattaatgtgagtacctactgacaattatcagtttcattcatctcactttgtaactgctctatcttgtaatgccttatctctaatgtttttgaaattttctttccacgtagtatcatcccatctgaagatttgagcaaagatcatttacttctgagtcattcttcatatttagttattcttactacacgtagagtggtggtattacagactttcttgagaatcatatctagctatttcccccccgtatagaggcataacataccatttggcacaatattcaaagagtctatgctgaagcctattcatagactttagatcgagagcttttgtatcataatattcattggctaaaaacattctttaagtattaaagagaaggcaacaatataaaaatataaaatatttcagactcaaaagtgattaaaccatcataccacttatgaaactttataaatataataaaggtgaatattagatagggcatacattactcatctccagatgaaatttttggaataactgaagatcttttaaagacttgggaatgttttcagtacaggttaaaattttgtaaattattattttatatcacataaataacaaatttgcattttagataattcaaattacttggactgatttctgcaaagttgtgtcttttatacttaatgccaagattgcattctatggtataaaattataatttcaatttattttctagtttggttgtttaagtattaagctaaacttagatgttcctattggcttaacaatttgtttaggtcaaagagtatgtgagaactacataacacactattattatttgtttctttttgagatagagtcttgctctatcacccaggctggtgtgcagtggcgcaatctcagctcactgcaatctccacctcccatgttcaagcaattctcctgcctcagctttccgagaagctgggactacaggcatgcaccaccactcctggctaatttttgtatttttagtagagatgggttttcaccatgttggccaggctggtcttgaactcctgacctcaggtgatctgcctgcctcagcctcccaaagtgctgggattacaggtgtaagtcactgagcccagcctattttttaaaattaaagttccttagcatgtatggtacattgaccacttttgaaaatgaaaaataggaaagaaacttggtgatgatattagacaatttaaataattagcctgatgacatcaaaattcaaatatgtttttaattacttaacgttttatagtttatttaagttatcttatacttgtagagccattcttggttactctttcctggtgttgtaaaggtgtcatatttcagttgcctttattattatatgcagtaggaatgaatggcaacaaattattggtttaaagattttgacttgagtattaatagacttacaaaatctatgtgtacttgttcacaatgagttgtaggatcttatctgtttttttctcttaaagctgatcttgaattaatgaataaactcatgaaaggtcttttgatgcccccttgcataacagtcaccattctgattttctgaagagaagcatgtcctaactactaaatgacctgtaggggaagatttagagaaaaagcaaaaggttgatatcaagttcacattctcttgactttagtcaatgagattaggctccaaaaccctttaagagatctttcgcattttagtgctccattgttgctttgggatagtgtgaaatttggaggcttcaactaaacattttacattaaagtgctttacttttgctagagtaaaactttccagaatctattcctgagatttgttttaacatgttatggaaatgagagcagttatgtgaaaagttatcacattcaagcatcaaggaaccaaacaataacgctctccatatttatgatgaattctaactttcatcagatttatgaataagacaatttatataaatgaaatattgtttggtattagacatattttagtttcttatcctttgttaaatacaaattcctaactttctctaaaatcttacgatggagtgcttgtgaaggttaaaagttattgaaacagcggaattgtaagctatataaggggaggggtgctgtatattattctgtatatcattttccatgataaagtgtaggttctggcctactgtatttgaaagatttctactttgaagcagaaaacatttttaagctacagcgtaataaaattgttgatgttttgttactaatatcatgtatattaactaaacccgcatttataaatgatccgtgaaaaataacccaaagtcgaaacattagaattaagagtgacccaggaagtggctaaaccgaaaagaacctcaggatctttcttgtacttacataatcagtcacatgatgtcgctctacactcagaaggtgaaacaggaaaatttttttctccgcacccacattccaatcattcacggaataggatcgactccataatgactgtgatgctggaaaaaatttactaaatatgtacttacagaaaagggtgactgctcataaaatacctcaggcaagcgatcccttaaaactgattgtcccaactcagaggccctcattttctgcaatggtgattatcggaccaagaggcccgggatcccagcgtctgctgctctcgcttctgctccttgcagcctgggaggtggggagcggccagctccactactccgtctacgaggaggccaaacacggcaccttcgtgggccgcatcgctcaggacctggggctggagctggcggagctggtgccgcgcctgttccgggtggcgtccaaaagacacggggaccttctggaggtaaatctgcagaatggcattttgtttgtgaattctcggatcgaccgcgagaagctgtgcgggcggagcgcggagtgcagtatccacctggaggtgatcgtggacaggccgctgcaggttttccatgtggacgtggaggtgaaggacattaacgacaacccgccggtgttcagagaaagggaacaaaaggtacctgtttctgaatctgcgcctctggactctcattttcctctagagggcgcttctgatgcggatatcggcgtaaactctcttttgacctatgcgttaagtctaaatgagaattttgagcttaaaataaaaacaaaaaaagataaaagtatattgcctgaattagttcttcggaagttattggacagagagcaaacgccaaaactcaatttattgctgatggtaatcgatggcggtaaaccagaactaacagggtctgtccagattcaaataaccgtcctggatgtgaatgacaatggtccggcgtttgataagcccagctataaagtagtgttgtctgaaaatgtccaaaacgacacaagagtgatccaactaaatgcttccgatccagacgaaggacttaatggagaaatttcctatgggatcaaaatgattttgccagtgagtgagaaatgtatgttttcaataaatccagacacaggtgaaattagaatttatggtgaactggattttgaagagaataatgcctatgaaattcaggttaacgccattgataaagggattccttccatggcaggtcacagcatggtcctggtggaagttctggacgtgaatgacaatgtccctgaagtaatggttacttcactgtcgctccctgtgcaagaggatgctcaggtgggtaccgtcattgccctgattagcgtgtcggatcgtgactctggagccaatggacaggtcatctgctcactgacacctcatgttcccttcaagctggtgtccacctacaagaattactactcgttggtgctggacagcgccctggaccgcgagagcgtgtcggcctatgagctggtggtgactgcgcgggatgggggctcgccttcgctgtgggccacggctagagtgtccgtggaggtggccgacgtgaacgacaatgcgcctgcgttcgcgcagcccgagtacacagtgttcgtgaaggagaacaacccgccgggctgccacatcttcacggtgtcggcatgggacgcggacgcgcagaagaacgcgctggtgtcctactcgctggtggagcggcgggtgggcgagcacgcactgtcgagctacgtgtcggtgcacgcggagagcggcaaggtgtacgcgctgcagccgctagaccacgaggagctggagctgctgcagttccaggtgagcgcgcgcgacgccggcgtgccgcctctgggcagcaacgtgacgctgcaggtgttcgtgctggacgagaacgacaacgcgccggcactgctggcgactccggctggcagcgcaggaggcgcagttagcgagttggtaccgcggtcggtgggtgcgggccacgtggtggcgaaagtgcgcgcggtggacgctgactccggctataacgcttggctgtcctacgagttgcaaccggcggcggtcggcgcgcacatcccgttccacgtggggctgtacactggcgagatcagcacgacacgcatcctggatgaggcggacgctccgcgccaccgcctgctggtgctggtgaaggaccacggtgagcccgcgctgacgtccacggccacggtgctggtgtcgctggtggagaacggccaggccccaaagacgtcgtcgcgggcctcagtgggcgctgtggatcccgaagcggctctggtggatattaacgtgtacctcatcatcgccatctgtgcggtgtccagcctgctggtgctcacgctgctgctgtacactgcgctgcgttgctcagcgccgcccaccgtgagccggtgcgcgccgggcaagcccacgctggtgtgctccagcgccgtggggagttggtcttactcgcagcagaggaggcagagggtgtgctctgcagagagcccgcccaagacggacctcatggccttcagcccaagccttcagctgtctcgagaagattgtttaaatcctcccagtgaagtaagttattaatattatttagatatatttgtttccttgaagaacttccgtttaggttataactacattctctcatttttctttatgattctatcctttaaactatcgaatgtctcatctttcttggtcattcttactcattttgaacttttatgtatttgtctaacattaatgaaggaaatatgtaggtacaatggaggccatggagcaccacacttaatatttttctttttctataatattttatatgactgatgaaccttgaaaaaaacagtatattagattaaaaagtggccagatgtttgataacttaaaaatttaatttgttcataatttcaagattacaggtaagttgcaagaatggtacaaagagttcctagatcccattaatggattctttaactcttcctcacgtgcttaggcttttaaaatagccttcttgatcactattctaatttcagtacaatctagacattttcacattatattccaggtattatcacaataatataaatgatatgtctgacatatgatgaatgattttcttcattgctcacaaaatatcttctttatttcaagtaggaatagatactgtactattcttatttacatgaaatataataaaatcatttctcaatttaaaaatatttaaccatctgtacgatacagtacagttggtaaccaactgtggctcaaaccagtttcagatgatcccaaacttatcatagtataccactgccctgtgcctattaccaagtgaatcttctaatgtgcattttacatattttaactttctatttctacaaaaatatccagaggcttctctttaaccagggaataaagtcttacataccccagcctggtagtaaaggcattaaaatttccagccttatatctactttcttacatatctttagtttaggatctggaatatagtatatgttcaatcactttttaaaaacatatgggggtcttgctatgttgcacaggctggactagaacttctgggttcaactgatcctccatttcagcctttcaagtagctgagactacaggcaggctccaccactcccagcttcaatcaataattttaaataaatatatggtattgaaatgtattacctggacattcccctctatcttagaaatgagagtatgccctagaaatcagataatgttttattgaagagtgtcttgaaagatagacaacattttaccaagaaagtgttaagagagataagtaggaacaactgcacagtatatggtgtaattgaaggattagagcaggggagattgtgaaggcaggaaagctatttcttttttaataaattaggtatcaagtaatggagacttaaattatggcagtagaaatgaattgaaaaagacatatacaagaggcactggcaaagtagaagcagccagataatgacagactcaatacaaatgataagagaaaaacaaaagtagaagttgactctcacttttttagtttgttcagctgagaagatgacattgccattaaccaacctgcagaacaaggttggagaaacagtttgtgtgtatttgagcaggtagggaatggagatgaacatttaagaaaatgttactttgaagtcctaagagaataccgttgtgattggaaatatgggtctggatctcagaagagattattgatatagattttgggaacaactcctttagagaaaaaaataatccatgaaagaataaaattgccaagacagacattgaaaagtgaaaaacaatgtgtccaggtacttaggtgggtaagtgtgtcgcttcctgtggctgctataacaaacgaacacaaactgggtgctgtaaaacagcaaaagtttattatttctcagtattggagaccagaagtccaaaatcaaggtgttgtcaaggctatactctctttggaggccccagggaagaatctggtttttgtttcttccagtttctattggctgttggtgttccctggcttgtggctgtaccactcccatctcagccttctcagctttcatggtcacattgcctcctcctctccatgtctctctctatgtgttggttttacaaaggtacatgtgattgtatttagggcccatctggataatccaggataaactcctttcaagatccttaacttaatcatattattcaccatataaagtaaaatccacaagttccagggattaagatgtgggcataactttttggggaccacaattcaacctattatagtaggcttaaaatcatagaaggatagacaacaggaagctgaaataaagctcaaagtgcaatatatcaagtatatgttagaagttaaacatgaagggaaaaagataaacagaagaggttttccaccagaagtagaacatttaaattagtgtatgtgcgtgtgtgtatgtatacatattttagttaaagaagtttgactatcttcatagtgtgagtgaaagaaacaagtaaaaaataagatactaaaaataagacaggcagcaggtgaatttagatgaaaaccatgagagaatagaaaataatttttaagagcatatggttgaccttaaaagcgggaacagtttttccttacaactagtagaaaatgaaaacagataatataaggaaaaatgacacaagaagagagcaattgaatttctgtttggtcacatctctcaatgtgtgaatcatctgaaagtgaactgatggaaatgaggttgagaatttgagaagagaggaaagagaatatggaagaatctctgtaagcaagagggaggagttaattatcaattcacttgagagcccaactgaggtaaaggtgagagtaaatttgaagagaatagtcatggttaagtgacaatgttgagcagcttaataggaagcatagagaaaatggattgtcagtgtaactgcgtgttggaggctaaaaagaatgttagaggagtaatataaataggtgaatgactctagagtgtctggaagggcatattttaaatggttgactatgtagtctaattatgtgaagaggtaaataaagaaatgtagggccagatagaaagaattagaagagaaatactatgttagtaaaagtaatggagcaggagaggatgatgagggtaagagaataccaaatactctgcctaaattttcagaggagagcagagctatggaaataaacccaacagtcatttcctatagagttgtgcacagaacaggccagataattattggagctatgatatatttttcattacaccatttggcctgggattttgtggcttggtagagatagttataacaatagataaaagtaagatcctcttcctcttttccttgctaaagatatgttaacatctttgtctagctgttgtttcttggaaaattaaagtcaatttaaatgacggcaaggttttactcagtgatgatgaagtaagatggagagagaaaatggaaactttaacctcctggttaaattctatttaaccaggacgccgattcgggctacaatgcgtggctttcgtatgaattgcagccggcggcggtaagttaaattctattaaatcaataggatattagttccaggcatattttataaaaacagaatccaaaaccttagagcattgttgtggctaaattattgtgtttatgcacatacacacactcacatacaaaatcccacacatattgactgaacactttcttttgaatataaatatcttatctacatctcaagtcacattgagggaaatttattaatatgatgtgcttattcaaaatctgatatatcagttaccaatatttttcaccttcaccgattttattcttatgtgattgttatgtttccttttggagtcaatggctgttgtgtgaggaggtcttgaaaaatattacaggaagaggacagtaccacaaaaacctacatgactatgcagaactaccgatcaattgtcccaaaacgagtgtcgaatattctttgtcttaaagttctgcatggaattcttacacatggaaaaataaatttgtggcaaaatgaaactcatcaaccaattgtcagctaatataaaatgttgagcagaatgcagtgatttgctgtttctgggaaggtaaacatttaatcttcaattacatatttgcagtgaaaatgtcaggaaatgcaaggggcaaaaaaatactacatcaatggaaaatatgaagactgagtcatacttacacttacacgttcatgcgcatggtgtcgctcttcactgagaacgtttccgcgaagaaagccgccgtttctttcttcctgcagaaaatatagcagaaagcggaatacctcttgcgaatccttccgcactaggaagccataaaaattgggccttgagagacagtttgaggtaaggcgttgtatatattgcagatagctctgaggtttttggagtgtaccatgctgtcttcctggcaaggaggcccaagaccgcggcaactactgctctggcttctgatcctcgcagcctgggagacgggtagtggccagctccactactccgtccccgaggaagcaaaacacggcaccttcgtgggccgcatcgctcaggacctggggctggagctggcggagctggtgccgcgcctgttccgggtggcgtccaaaagacacggggaccttctggaggtaaatctgcagaatggcattttgtttgtgaattctcggatcgaccgcgaggagctgtgtgggcggagcgcggagtgcagcatccacctggaggtgatcgtggacaggcctctgcaggttttccatgtggaggtgaaggtgagggacattaacgacaacccgcccatattccctgaaagcaagaaacgaataatcattgcagaatctagacctccggaaactcgatttccactagatggcgcatccgatgcagatattggagtaaactcggcattgacctaccgactggatcccaacgattatttcactttggacgcacaaaacagtcttgagcaaatgtcttcattatcacttgtactgaggaaaacactggacagagaggaaattcaggaacatagtttattactgacagccagtgatggaggtaaacccgagctgactggcacagttcagctgctcatcacgattctggacgtgaatgacaacgccccggaattttaccaatccgtttataaagtgacggtgttagagaacgccttcaatggaacattagtgatcaagctaaatgccacagatcctgatgatggtacaaatggagatatagtttactcatttagaaggcctgtatggcctgcagtggtatatgcatttaccataaatccgaacaatggagaaattaggacaaaaggcaaactagatttcgaagaaaagaaattatatgaaatatccgtggaggcagttgacaaaggaaatattccaatggcgggtcattgtacccttttggtggaagtactagatgtaaatgataacgccccagaggttaccatcacttctttgtcactccccatcagagaagacactcagcctagcgccattattgccctaatcagtgtgtccgatcgtgactctggctcaaatggacaggtcacctgcaccttgacgccgcatgtccccttcaagctggtgtccacctacaagaactactactcattagtgctggacagcgccctggaccgcgagagcgtatcagcctatgaactggtggtgaccgcgcgggacgggggctcgccttcgctgtgggccacggccagcgtgtcggtgggggtggccgacgtgaacgacaacgcgccggcgttcgcgcagcccgagtacacggtgttcgtgaaggaaaacaatccgccgggctgccacatcttcacggtgtctgctcaggacgcggacgcacaggagaacgcgctggtctcctactcgctggtggagcggcgggtgggcgagcgtgcgctgtcgagctacgtgtcggtgcacgcggagagcggcaaggtgtacgcgctgcagccgttggaccacgaggagctggagctgttgcagttccaggtgagcgcgcgcgactctggcgtgccgcctctgggcagcaacgtgacgctgcaggtgttcgtgctggacgagaacgacaacgctccggcgctgctgacgcccggggctggcagcgcgggaggcacagtgagcgagctgatgccgcggtcggtgggtgcaggccacgtggtggcgaaggtgcgcgcggtggacgccgattcgggctacaatgcgtggctttcgtatgaattgcagctggcggcggtcggcgcgcgcatcccgttccgcgtggggctgtacactggcgagatcagcacgacgcgccctctggacgaggtggacgcgccgcaccaccgccttctggtgctggtgaaggaccacggtgagcccgcgctgacggccacggcaacggtgctgttgtcgctggtggagagcggccaagcgccacaggcttcgtcgagggcgtcggcaggcgctgtgggtccagaagcggcgctggtggatgtcaatgtttacttgatcattgccatctgcgcggtgtccagcctgttggtgctcacgttgctgctgtatactgcgctgcggtgctcggcaccgcccaccgagggcgcgtgcgcgccgggcaagcccactctagtgtgctccagcgcggcagggagttggtcgtactcgcagcagaggcggccgagggtgtgctctggggagggcccgcataagacggacctcatggccttcagtcccagccttcctccttgtctgggttctgcagagggaacaggccagagggaggaggactcagaatgcttgaaagaggtaagcttatattttaaaaaattgtcttagtaaacactttagccttccttgcagttgtttgtttaagacatctttcctgccaatttcaaattattctttactttaattttaattttgctagttgttatcgaatttaacaactctgctgtggacattatgtgttggattatccttcagagtgaaatcttaactcacaaaccataatgaaatgtgcaaaacaagaatattttgtttctgttgtattcttaatagttctaagtatttatcttgcaattgagcatttacaaaaaattcctcacgttgtgagaacttaaacatttagaaaatgtttgttttaatgaggctaatcgtaatcttaaatttaaaaaatttttagtttaatgtatacatatacccacaagatattattttaaagagccccataacttttcacataaatgctttttttaagtgcacttttctttctttctttttttaaactgttttgattgtctctacttttttgtcctctaggcacatcagtgttcccctctcatatatcccatgaaaaatatcttgtgattctgctttcaattttttatttgcattcagataattactcatacatatatatatacatatatagagagagacctggtaggctttttgttattatttcttttccaaagtttgaagggatttccaaaaggtactggtgactgaaagtaccttttggcagtccctgcaaatctaatggttttaatagctgtgtagtattccacagtgtaagtgtgcaattatatattatttacctaatgatgggcaatcactttgtgtcaagtgttctgttatcttcatgaaccatgctgtgctatcatttcatatatttcccaaaatattggtgttatttctacgaaattgattgtcagatgtggaattgatgcatcaaagatattaataattttaattataaaatatgtcactggattgccttccaagtattttggaaccaaccagttatgagcactctttctatctcaagaagcaatagtggttttactttctgctaatgtgatctctgtgaaatgatatttcactgttactttaattttaaattcctgtatagtattagtgaatttgagcatattgtcatatgtattttgttgatttgtatttgatcttctttgatttatccattaagttatttgcctacttttctattgaaaaaaaatttttagtttcagtttggaaaagttctctgtaccttatagatattaactgtttatctattttttgacatttttaattaaaatttttattttgagataattatagattcgcatgtggttgaaagaaatagtaaagggagatgctatgtattcttcactaagttttccccaatagtaacatcttacaaaagcgtagggccataccacaacctggatattgacattgatacagtaaagaagtaacatagttccgtaacaaccagattcttgatatcacctttttatagccacatctgcttccctgcctaatgctggcaagcagtaatctgttctccatttctctaattttgttacttttacttcagaaataaataaaagtatctctatttatagataaaattttttaaaattatttttatatttatttattttttattacactttaagttctgggatacatgtgcagaacgtgcaggtttgttacataggtgtacatgccatggtgtgcttatctattatctgcatcacaaatatgttttcctcctatattatttctattcatttgtttgtactaattttgtcatatataaatgtttttaaaatgtatgaattaaaatatatctttttccttttatggattttaaggtctgcatattcagttagaaaggtcttcccagctgggcacggtggctcacgcctgtaatcccagcactttgggaggccaaggtgggcggatcaggagatcaggagtccgagaccagcctggccaacatggtgaaaccctgtctctactaaaaatacaaaaattagcgaggcatggtggcacgcgcctgtaatcccagctacttgggaggctgaagcaagagaattgcttgaacccgggaggtggaggttgcagtgagatgagatcatgctactgtactccagctctgggtgacagagcaagacttcgtcttgaaaaaaaaaaaaaaaaaaaagaaaggtcttcccaactcctatattgaacattcattaattaaatgcatttaataaatacttattgagtgttctctatgtgccaggcatgttctacacattagacatttagcaacgaaatttattattttgtaaatccaaatttccagttggtatcactttcctactgcctgaaaaatttctttaatattttttatagtgcatatgttctggcaacaaattcactcagcttttgtctgagaaatatctttatctctttttttttttttgagacggagtctcactctgtcgcccaggctggagtacagtggcgtgatctcggctcactgcaagctccacctcccgggttcacgccattctcctgcctcagcctcccgagtagctgagactaccggcgcccgccaccacgccctgctaattttttgtatttttagtagagatggggtttcatcttgttagccaggatagtctcgaactcctgacctcgtgatccacctggctcggcctcccaaagtgctgggattacaggtgtgagccaccgcgcccggctctttatctcatttttatttttgaaaaagtattttcactgggcatagttgacagttttttaaaagatataattcagttgtcttctggcttgcatagtttctaataagatgtttgcttttttatatatgagtcttcctctccccacccctcatggttactgttaaaacttttctttttatcctgacttttgcagattgattgtgatgtgctttagtatggttttctttatgttagtctgttggggtttgttgatattcttggatctgtggatttatcattttcatcaaattcaggaaaaaatcaaccatacttcttctaatagttttttctttccttccatcctttctgagactccagtaacacatatgttacaatgacacaggtcattgaagcgttctttatttttgtccatttctttctctgtgcctcattttgaatatcttttattgacatattttccaagttcactaatttttccttttgtagtatcatatctgttaatcctaaacagtgtattcttcatttcagagaccatatttatttcttatctgtataagattctttttgtctcttttaaaatttattttacatgtctccaccgaatagtcatctttttatctatatgtttgagcatattagtacatgtataatagatgttttaactttcttgtctgctaatttcaacatttttgtccttagtttgcttcttttaatctatcttcttctatggatatattttcttgctgttttgcatgactggtaatctctaataagatgctagacattgtgaattttacattgtcggatgctggattttgtgtgtgtgtgcatgtgtgtgcgtgttcctttaaagcagtagttcttgataagaaacagttttgtcccctctaccccctacccaggagataatttggcaatgcctggatacatttttggttattacaactagggaattgctactggcatctaataatggagctctgagatgctgctaaacaccatccaattgctgccaaacatcctaccgtgcacaggacagccgcccaacaataaagaattagctcaaaatgtcagtagttccactgttgagaaactctgctttaaagagtcttggacttagttctgacgtgaagttaagttgctcagtaccaatttattcctttcaaggcttcattttaagatttgttagtacacattcagagcagcttttagtgtagcactaattcggccttctattacagcaatactttcctgaggacaccacctaatgccctgtgcattaagaggtctctcttctctgattggtaggaatgtgaaatatttccagccctttgtgagctctaggaattattctacccacttttttttttaattttgaagggatagcctgatctggggaggttgatcagtgatctgtgatctgtgatcacatcactccactgcagcctggtgacagagtgagaccatgtctcaacataaaaattaaaacattagaattgaggtttaatgttatcaaatattttatctgcatcttttgagggaggtataaattttttctttggcaatgttaatgtgttgaatttatgatttatgattttcttatggcaaaccaacctctacttccttggataaccgtaatttgattataatttataatccttttaatatactacttattttgttaaattttcaaaacaattttttcatctttattccaggtgatactgatatgtcctagtttttcttcctaatttcttctttgttaagtattcaagttataaataagaatctagcataacttgaatacttaacaaagaagaatagtctttgaaaacttccagaaaattttctgtttcctgtaaaagtttgtataatctttgaattacttcttatttgattggagaactcactgttgaagttatctgtatcaggattttgattggtgggaatatttctgattactgactcaattttaatagtataaggaccattcagagtttaatttactcgagtcagttacgtagataatattttttcaggtattttcctgtttaatctaaattttcagttatatgctcatactttctacagaatctatagtgatatttccctttccattcttgatattatttttgcttcctgtctaatttacttttcttcagaattctgctttctgatttttgtttttgctttgaaatatttttatattaattatactgattcatttctcttcttttcatttgtgtttgcaggagatgtcctcttcccagccttttattttaaaccttttagtattatgggcatattccacaagttctttgctactgtctcactgagtagcagagtctaatttttctttccttgaactttgactggtcttaatattggaagtaacattctgggatttatgaagtcaggtcataagaagtcttacagtatgctttggtctctgagaatatttgttttgggggaagcctgccaccatgtaagaattctgactaccttgagattgtcatactgtaaagaagctcaagctggacttgtgagaagccaaatggatagaaaaattactatccagtctccagttgtcttagctttccaagcttaggtgccagaaaaatgtagaaggcttcaggtgactgtagtgtgttggagctggctcttttactggcttatgagaactgataatgcaaatttattcccaactctggattcaatgatgtcactttggtagcttgaaattggccatggtaggagtatttctgccacagaaataggcaaatgctacaaaacagagttttttgtttttcttttttcccagagacctagttgttaagcatttaccagtacactactgcacctgattgcaagcaagaaccactcagttgagtcagaaccaggagaggtaatattaagttgttttaagatattaggtagttgggatggtttactatatagcaatggataacctgaacaagtactctttcttagataatctataaattttaacttgaatatttatttagtttatatttacaatacctagtgatatctttaggcacaaatatttcaattttttgtgcgttatttttgtctcaccatttttatgtctctatttccttcctttgttgatcttcttttgaaatgactgagtactttttattgttccatttccttctgtattatttggaagcccttttccgaatagctagtgcttaccctagaaaattaagcatgtatccttgatatatcaaaatcaaaagttaactgaaacccttcctccttctgggaaatgcagggaccttacatttttaaaatctttttaatcccttttgacttatatactatttctgtcatgctttaaaaatattttaaaaccccataagatattagtattattttatacaatcaacattgttttaaatgtacttacatatttaccagttttgtttctcttccttacttcttgcccctctgacctttcatcagggattattgtctttccatgttagaataatttgagagtttcctttagtccaaagatgctggtgaggaatgatttcaggttttgtttttctgaaaatgtctttatttcatcataattattgaaaagcattttttctgagggtataatcttaggtgtgacccccacagcacatagtaaatattattccagtgtctactggtttccattgttgctgtcaagaatttagctgtcaatctaaatgtcattcctttaaaggtattctgtttattttcctttggctgcttttcagattttctgtgtgtctgatattttgcagttttaccatgctgtgtctttataatcatcctgttctggattcagtaggattttttttaatttttaatttttccgtaagttattgggggtacaggtggtatttgattacatgagtaagttctttggtggtgatttgtgagattttggtgcatccatcacctgagcagtatacattgcaccatatttgcaatcttttatccctcgccaccccccactcttgcccccaagtccccaacgtccattgtataggatttttgaatttgtgaattaatgcctttacatcactttgagcatatcctcagctataatgttctccaatgttgcttctgttccattgtatttctatagtattattttagtactctaattaaacatattttaatcttattactctatcccatctatttctaccttttattttaacaccttttgctctttgggctttattgtggatagttcacccaccttaaagtttaataattctctcttcttgctgttgtctgaatttgtacccccaaattcatgtgttgaaaattcaatcccttatacaacagtgttgggaggtggggaatttcaggaaatgtttagattatgagggatctgccctcatgaataaattaacggcactgtaaaaggacttgatggaaggagcctgtccctctcttatgcttttggctctgtcatgtgacgatgcagcaagaagatcttcaccagatgctggtgccttgatcttggacttcccctaggctccagaattgtgagaagtaaatttccgttctcataaattactcagtctgtggcattctgttatagcagcacaaatggtctaagatacttttatttattctttttcaaatttattgttactttgtataatttctagtttcctctcgaaactttcaagcttggcatttatatctggaacacaataagctcatggttttagcgtctatttctgatatgtccagtaactgggatcctcatgggtctattcctgtggtgtgttttaaaattgtatctttatggtgttttgtctccacataaacctggttatctttgattttgtgctgaaagttgtattaaacacttcttcctggaaataatttggggcttataacattttctttctccagaatggattttaattgacttttgccaggcatcttggggcactagcaatcatgggtaatcttaatctatttcaagcttcaggtattctagataaaacctcattatctaaaatttacatgtattctttaagtacggttattcagtttcctagccaaacatgagagattgtttaagaagttccaccatgactggtagactcaggattctgacttttgtttctctagtccttggagactgtcaaaagtatatctcagtattcattcacctatttttttccttttatttccagttggtacataataattgtacatatttataggatacagagtgacattttgatacatatatacaatgtataataataaaatcagggtaattagcatattcataatctcaaacatttaccatttttgcatggtgaacatttaaaatccactcttctagcttcttgaaaatatgtaagaaattatagttaaccatatttatcctacagtgctacagtgctgcaaaacaccacaacccattcctcctgtgtagctataatttcgtatccattaaccaacctttccccatcctccttttccttcacccttcccagcctctgataagcacaatactacttccatgagctcaataaaattttgtagctgccgtataagtgagaacatgtatttatttttctgtgcctgacttatttcacttaacatatgccctccaggctcagccatactgccatgaataacaggatttcattcttttttatggctggataatattccgttgtgcatatacaccacattttctttatccactcatctgttgatggatattgaggttgattccacatagtagctattgtgaatagtgctgcagtaagtatgggaggtgcaggtatcactttgacatactggtttccttttctttggataaatgcccaatagtggaattgctggatgatatggtagttctatttgtagttttttgagggactcccatactgttttccttagtggcagtgctaatttacatgcccaccaacagcatttatgggacagtggctcatgcctgtaatcccagcacttagggaggcagaggcaggaagatcgcttgaagccaggagttcaagaccagcctgggcaacatagcaagaccctgttcttcacaaaaaagaaaaaaaaagcagttgtagaactcctttaagtatttcttgtaggacttatctagttgtagtgtacttcctcagtttttgcttgtttgggaaatactttatttctccttcatttctgaagtatagctctgcttggtatagtatttttggctgatagttttaaaaaatttcagcactttggatatatcatctcattctatcctagcctgtaaagcttctgctgagaaatctgctgttagtctgatgggaattttcttataggtgacttgtcacttttcttttaccgtttttagaattccctccttgtcttgagtctggtaccgtagactactcagccatcctgatgccctacctcttgtatagaaacaacccagatccaaagtggccagaaagttactttaccttctgaatttgtggtctttttcagaatctctacctgttaattctgcatgactttattagtcattagatacttttataattttaaaatatctccaattgtatggttggttcaaattaccagttctgcatactggtaatgtaagtcctctgttgaattgatttttaaatacatttattttattccagtatcttctagctcctggtgttgcagatgagaagtttcaaataacttgaaataattcccttctatgtaattatccctgattttgactttctttccatagttatatattttttctatgctattatattctcattttaaagatgttgaatgacaatgtaattttcttttctttacaagtggtagcttatttacaagtatttttgaagtttattttcctggaaagttttcttaaattatagattttagtatttcttctgttttattacttcagatttcttcttcaatggctccaattatatttgtattagatattctttgcttttcttttgtagctaacactcctaaatcctacctagctcttttttaaaaaatattttactttttattcttgttttcatcttatagttttctttaggcattatccatagtgtttatatgctgttatgtgccttctggtttagtgtttacttctgaaaaaattattttccttttttttaatattttactgagttttctcatctctcttttcaaagcttttcttctccaatcatatcattactgagtctctctaattctgatttgtgtattcttgcatagcttttcattattttctaaaaatgtttaagttgttttcaaatattacgtagcaatttgtggaattttttttcttgtgtgtatttatttcctttagtgtaattatttgtcctctcctttaaaaataattttatatcagatttgcccataatccttttcttatgctcatttttatatgaaaagtgctcccccataattttagaagaaacagaccaggataattttcctatctttgttgctctatagatttctattcagctattgtcatgaaatgataaaaatataattttttaatgtcttactttgtgacatcctttaccctttttacttggacctttttcctttgtttaattgtcccccacccacaccattctgcttcatatggactcaattcctatcagttcctcctcagtataggggtttttgctacaagaagacatttgttagttgacaagttcatagggctaagacaggtttagcacaatccaatctatttgtagtcccttctgctaagttttgaatttgcttttatttctaatattttactgagttttctcatctctcttttcaaagctttcttttttttcttactcagggataattgaattaggaccttcgatttccccccttccacccatgactattgttctcaaattgttttactatgctttccagtgagtacttattggcactttttggagttcttcaattctcaacaccatcaaaagccccataaccttcttttgcttcctcctgagactcttttcatgtgcttattggtcatttctttatcctcttcggagaaatacctattcagaacttttgcccaatttttaattggtttattcgtttttcaattgttgagttgtaagagttctttatatattctagatgcaattactttattagatatataatttgcaaagattttctcattgagggtgttgtcttttcacattcttttttagctcccacttataagtgagaacatgtagtatttggttttctgtttctatattaattcacttgggataatggcctgcacctccattcaatgggctgcaaagggcatgatctttttctttctttatggctgcatagtattcaatgacgtatatgtacaatactgtattgtattgtattgtatttttttcagacaaagtctcactcttgtaccccaggctggagtgcaatggcgcgatctcggctcactgcaacctccgcgtcccgggctcaacaattatcctgcctcagcctcccgagtagctgggattacaggtgcctgtcaccaggcctagctaatttttgtattttaagtagagacagggtttctccatgttggccaggctggtctcgaactcctgacctcaggtgatccgcctgcctcggcctcccaacatgctgggattacaggcgtgagccactgtgcctggccaatgtactgcattttatttatccagtgcaccattgatgggcatttaggattattctctgtctttgctattgtgaatagtgccatgatgaacatacacatacatgtgtctttatagtagaatgacttatattcctttggttatgtacacagttatgggatttgctggcttgaatggtaagttctttgagaaatcttcaaactgctttccacagtggctaaactaatttatattcccgccagcagtgtataagcattcccttttctctgcaacctcaccagcatctgttatttttgactttttagtaatagccattctgactggtgtgactgcaacctccacctcctgggttcaagcggttctcctgcctcagcctcctgagtagctgggactgtgcaggcacacaccacaaagcccagctatttttcttttttttttttgtattttaagtagagatggggttttgacgtgttggccaggctggtctcgaactcctggtcttaagtgatccacctgccttggcctcccaaagtgctagtattacaggcatgagtcactgtgcccggccctttgcccattttttgatgaggttgtttgttttttgcttgttaatttgtttaagttccttatagattctggatattagacctttgttggatgcatagtttgctgatattttctcccatcctgtaggttgtctgtttactctgttcatagttgtttttattttttaattttatgggtacataataagtgtacatatttatggggtatatgagacattttgatacaagcatgcaatgcacaataatcacatcatggaaaatggaatggccattcccttaaacatttattctttgcacaaacaaaccagttatgctcttttagttatttttaaatatacaactaaattatttagaccatagtcaccctattctgctgtcaaatactatgtcttattcattttttctattttttatcctcattaaaaatctccactttctgtccacaccccactaaactttctagcctttgttaaccattcttctactgtctatctccatgggttcaaaaaatatatttttttattatactttaagttttagggtacatgtgcacaatgtgcaggttagttacatatgtatacatgtgccatgctggtgtgctgcacccattaactcgtcatttagcattaggtatatctcctaaagctatccctcccccctccccccaccccacaactgtccccagagtgtgatgttcccttccccttcctgtgtccatgtgttctcattgttcaattcccatctatgagtgagaacatgcagtgtttggttttttgtccttgcgatagtttactgagaatgatgatttccaatttcaaccatgtccctacaaaggacatgaactcatcattttttatggctgcatagtcttccatggtgtatatgtgccacattttcttaatccagtctgtcattgttggacatttgggttggttccaagtctttactattgtgtatagtgccacaataaacatacgtgtgcatgtgtctttatagcagcatgatttatagtcctttgggcatatacccagtaatgggatggctgggtcaaatagtatttctagttctagatccctgaggaatcgccacactgacttccacaatggttgaactagtttagagtcccaccaacagtgtaaaagtgttcctatttctccacatcctctccagcacctgttgtttcctgactttttaatgattgccattctaactggtgtgagatggtatctcattgtggttttgatttgcgtttctctgatggccagtgatgattagcattttttcatgtgtcttttggctgcataaatgtcttcttttgagaagtgtctgttcatatcctttgcccactttttgatggggttgtttgtttttttcttgtaaatttgtttgagttcattgtagattctggatattagccctttgtcagatgagtaggttgcgaaaattttctcccattttgtaggttgcctgttcacgctgatggtggtttcttttgctgtgcagaagctctttagtttaattagatcccatttgtcaattttggcttttgttgccattgcttttggtgttttagacatgaagtccttgcccatgcctaagttctgaatggtaatgcctaggttttcttctagggtttttatggttttgggtctaacgtttaagtctttaatccatcttgaattaatttttgtataaggtgtaaggaagggatccagtttcagctttctacatacggctagccagttttcccagcaccatttattaaatagggaatcctttccccattgcttgtttttctcaggtttgtcaaagatcagatagttgtagatatgcggcgttatttctgagggctctgttctgttccatttatctatgtctctgttttggtaccagtgccatgctgttttggttactgtagccttgtagtatagtttgaagtcaggtagcataatgcctccagctttgttcttttggcttaggattgacttggtgttgcgggctgttttttggttccatatgaactttaaagtagttttttccaattctgtgaagaaagtcattggtagcttgatggggatggcattgaatctgtaaattaccttgggcagtatggccattttcacgatactgattcttcctacccatgagcatggaatgttcttccatttctttgtatcctcttttatttcattgagcagtggtttgtagttctccttgaagaggtccttcacgtcccttgtaagttggattcctaagtattttattctctttgaagcagttgtgaatgggagttcactcatgatttggctctctgtttgtctgttattggtgtataagaatgcttgtgatttttgtacattgattttgtatcctgagactttgctgaagttgcttatcagcttaaggagattttgggctgagataatggggttttctagatatacaatcatgtcttctgcaaacagggacaatttgacttcctcttttcctaattgaataccctttatttccttctcctgcctaattgccctggccagaacttccaacactatgttgaataggagtggtgagagagggcatccctgtcttgtggcagttttcaaagggaatacttccagtttttgcccattcagtatgatattggctgtgggtttgtcatagatagctcttattattttgagatatgtcccatcaatacctaatttattgagagtttttagcatgaagggttgttgaattttgtcaaaggtcttttctgcatctattgagataatcatgtggtttttgtctttggttctgtttatatgctggattacatttattgatttgcatatattgcatcccagggatgaagcccacttgatcatggtggataagctttttgatgtgctgctggattcggtttgccagtattttattgaggacttttgcatcaatgttcatcaaggatattggtctaaaattctcttatttggttgtgtctctgcccggctttggtatcaggatgatgctggcctcataaaatgagttagggaggattccctctttttctattgattggaatagtttcagaaggaatggtaccagttcctccttttacctctggtataattcggctgtgaatccaatattttgttttgtttttcctttttgagacaggtcttgctgtgtcacccaggctggagtgcagtggtattaacagaactcagtgcagccttgacatcctgggctcaagcaatcctcctgcctcagcctcctgaatagctgggaccacaggcatgtgctgccatgcccagctacttttttgattttttttgtagagatgaggtctcactttgttacccagtttggccttgaattcctgggctcaagtgatcctttaacctcagcctccaaaagtgctgcagttacaagcatgcgccaccatacctggccttgttttgatttttaggtaccacaaataagtaagaacatacgatatttgtctttctgtgcctggtttatgtcacttataatgacatccagtttcatccaggttgttgcaaatgactggatcttgttttttttatggctgaatagtactccattgtgtatatgtaccacactttcttttctgtttttttagacagtctcacttttgtcgcccaggctggagtaccgtggcgcaatcttggctcaccgcaacctctgcctcctgggttcaagcgattctcctgcctcagcctcccaagtagctgggattataggcacgtgccaccacggccggctaattttttatttttagtagacacggagtttctccatgttggtcagactggtctcaaattcccagcctcaggtgatctgcccacctcggctttccaaagtgctgggattacaggcgtgagccacggcaccggcccattttctttacccgttcatctgatgatggacatgtagattgcttccaaatcttggctattgtgaacactgctgcaatgaacaatgggagtgcagttatctcttcaatatactgatttccgttcttttggaaagaaaggaaatcctacctagcagtgggatttctggatcacttggtagctctatttttggctttttgaggaaactccaaactgttctccatagtgcttgtactaatttacattcccaccaacaatgtacaaagtttccctttttttcacctctccagcattttttattgcctgtcatttggataaaagccattttaactgtggtaagatgatatctcattgtagttttgatttgcatttctctgattatcagtgatgttgagtatcttttcctatacctgtttgctattagtatgtcttcttttgagaaacatctattcaactcttttgcccattttaaaattagattattagatttttttttctatagagttgtttgagctccttctacattctggttattcatcacttgttagatgggtagattgtaaatattttctctcaatctgtgggttgtctcttcactttgttgattgtttgcttttctgtgcagaaggtttttaagttgatgtgatcccatatatccatttttttcctttggttccctgtgattgtggggtattactcaagaaatttttgcccagactgatgttccggagagtttccccaatgttttcttgtagtcgttttatagtttgatgtcttagatttaagtctttaatccattttaattcaatatttgtatatggtgagagataggggtctagtttcattcctctgcatatggatatctagtttcccagcacagactgtcttttctcgagtttatgttcttggcaccttcatcgaaaatgagttcattatagatatgtggatttgttttttggttctctattctgttccattcatctatgtgtctgtttttatgccagtgccatgatgttttggttactatatctctatggtataatttgaagtcaggtaatgtgattcttccggttttgttctttttgctcaagatacctttaggtattatgggtattttgtagttctatatacattttcagattgtcttttctatttctgtgaagaatgtccatggtattttgacagggattgcattgaatttgtagattactttgggtagtatgaacatttttacaatattgattcttccagtccataaacatgcaatatctttccatttttttgtgtcctcttcaatttctttcatcagcattttatatttttcattgtggagatctttcacttctttggttaattcctaggtatatttagttttattcgtggctatcgtaaatgggattactttttaatttcattttcagattgttcactgttgggacatatagaaatactactaatttttgtatgttgattttgtatcctgcaactttactgaatttattgttttaatagttttttggagtctttagatttttttaaaactgagattatatcatctgcaaacaaggataatttgatttcttcctttctaatttggatgtcctttatgtcttctctctctctctctttcttttttttttttttttttgagatgaggacttgctttgttgcccaggctggtctcgaactcctgggctcaagcaatcctcctgcctcagcctcccaaagtgctgggattacaggtgtaactcacttcgcctggcctaggaagccctttatttctttctcttgtctaattgctctagctaagagtactatgttgaatactatgttgaataacagtggtgaaagtgggcatccttgtcatattctagatcctagagaaaaggctttgagtttttgcctgctcagtatgatactagctgtgagtctgtcatatatggtttttattatgttgaggtatgttccttctatacccagatttttgagggtttttaagatttcaatagttttgggaaacaggtcgttttcagttacatgggtaagttatttagtggtgatttctgagattttggtgcacctgtcacccaagcagtgtacaccgtacctaatatgtgtagtcttttatctttcactcccctcccacccttccctccaagtcccccaaatccattatatcattcttatgtctttgcattctcatagcttagctctcacttgtatgtgagaatatacaatatttggttttcgatttctgagttacttcacttagaaaaatggcgtccaggtccacccaagctgctgcaaaagctattattttatttagtttatggctgagtagtattgcatggtgtatatataccacattttctttatccacttgttggctgatgggcatttaggttggttccatatttttgcaattgtgaattgtgctgctatcaacatggcttgcacatgtgtctttttcatgtaatgacttcttttcctttgggtagatacctgatagtggcattgctggatcaaataatagctctacttctaaatctttaagaaatctccaaactgttttccatagtggttgtgctggtttacattcccaccaatagtataaaagagtgtccttttcaccacattcatgccaacatctattactttttgatttttaaattatagtaattcttgcaggagtgaggtagtgtctcattgtgcattaggaaatttagtatacaataaagacagcatttttattgaggaaaggatgcattttaaaaaacaagtttttcaaaaatatagggaggattgtggttacttctagaaacagtagtgcagtcaggaaaaattcagcacaatatgtatcagtggaattcatctgatcaaacttaaaatattattccttgcattatagttctgagcaggtaccatagataatagttctattgtgttgttcactttaaactagagcaagaaacttttctaataagtggaattgggagctgtctagctggtgttggcctgataaatgcttaatacacatgaatgtgcatgcatatgtatgcatataccatatacatatattataaatttaactgatataaaagatgtttggtaaatagtttaaaatagtaataaaatatacaattctccctattatcaattattacagaatgtttcccttgatttttgctgaacttttctatccataaactatctatggttgtaattgacaagtatagttctcacatgaatgtctgttggtattttcatttatcttaacaaataatatagagtaaaatgacaaagacattgaatcttgacctgtttgtcaatgatgtgacttccttgctgcattggataatacctcttaaatactggaaaattatttgttgatttttggtctattcacaatgtaacagctacaaatatgatacactttaaaaaataatggtataatttaactttttaatttttttatttcaatgggtttttggggaacagtatttggttacatgaataactactttagtggtcattgctgagattttggtgcacccatcacccgagcagtatacattgcacccagtttgtagtcttttattcctcacccccttcccaccctttccccctaagtccccaaagtccattgtattatacttatgcctttgcatcctcatagcttagctcccacttatgaatgagaacatgtggtgtttggttttccattcctgagtttcttcacttagaataatggtctccagttccatccaggttgctgagaatgccattatttcattcctttttatggctgagtagtattccatggtgtattatatatataatacatatattttatatatatgtatattacaatttctttatacacttgttgattggtggctatttggtctgattccaaatttttacaattgtgaattgtgctgctataaacttgtgtgttcaagtatctttttcatataatgacttttttttcctctgggtagacacccagtagtgggactgctggatcaaatagtagttttacttttagttctttaaggaatctccacactgttttccatagtggttgtactagtttacattcccaccagcagtgtaaaattgttcccttttcaccacattctggccaacatctattatttttttattatgaccatttttgcaagaataagatggtatcacattattgttttaatttgcattttcctgataattagtgatgttgagcatttttttatatgtttcatatcttcttctgagaattgtctgtttatgtccttagctcactttttgatgggatttgtttttcttactgatttgtttgacttccttgtaggttctggatattagtcctttgtctgatgcagaatttgtgactattttctcccactctgtgggttgtctgtttactttgctaattcttttctatgcagaagctttttagtttaattaggtcccatttatttatttttgttgtagttgcactttcttttgggttctcagtcatgaattgtttgcctaagccaatgtctagaagagtttttctgctgttatattttagaattttcatggtttcaggttttagatttaagtctttgatccatcttgagttgatttttgtgtaaggtgagagatgaggatccagtttcattcttccacatgaggcttggcagttatcccagtaccatttcttgaataaggtgtcctttccacactttgtgtttgtatgctttgttgaagatcagttggctgtaagtatttgactatatttctggttctctgttctgtttcataggtctgtgtgcctatttttataccagtaccatgctggtttgataactacagccttttagtataatttaaagtcaggtaatgtgatgccttcagatttcttctttttgttttgtattgccttggggatgtgggctcttttttggttccatatgaactttaggattgtgtttttctagtcatgtgaagaatgataatgatattttgctgggaattgcattgaatctatagattgcttttgacagtatggtcagtttcacagtattgattcctgtcatccattaacatggaacatattccatttgtttgtgtcatttatgatttccttcagcagtgttttgtagttttccttgtagagatctttcacctccttggttaagtatattccgaagtgtattagtcagggttctctagagggacagaattaataggctagatgtgtatataaaggggagtttattaaggagtattaactcacacaatcacaaggcccaacaataggccatctgcaagctgaggagcaaggaatccaatctgagtcccaaagctgaagaacttggaatccgatgttcaaggggaggaagatccagcatgggagaaagatgtaggctgggaggctaagccagtctaatctctccacgttcttctgtctgcttttattctggctgcactggcagctgattagatcgcacccacccagactgagagtaagtgtgtctttcccagtccactgacacaaatgttagtctcctttgataacaccctcacagacacacccaggaacaatactttgcatccttcaatccaatcaagttgacactcagtattaaccatcacaagtcctccccttgtcaacttgaacccatacacacctcctgaaattatagataatcttcaaattaagacaataataaggtcataattattcccaacatgatacaactatccttcatacaaccaagaatgcaccaattcccaacccaaatgctattacataaagttaacatttaaattttcatatgaagtcaataaatcttatgtcacatgataaacaagaaaggaaataaaatgaagatattttcttagtacaaatgtataaatgcacaaacatgtttttaacaaagaaggaggaaatactcacgacaattaaaatcctcatttctgcaactggttgtgtggttcatagctggtattgatgactaccttcctctactactcattctgtattccctttgccttcagcaagcacctcagcaggtagtggttttttcctggtgtagtgacccaaaccttcattcctgaaggatctgggccatttgtagtcctgcctggattgtgctgttgtagtttcccattgacacagggcatggtaatactaagagacaccctaagggatcttgtgtattccatgcatactcttccttacctccactgtggagtagtagactgatttcatcttgagagtctgggtcagtcaccccagccaacactgtaacttccttcttagattgttggtttaaaggtaggaggagcccaaaaagtgtcccggtgtcaatcttaatttccagtttaatggaatcgtggttgtgtcttctggtggcagcattcctccctctggaactaagacctctaggccagcagaacataatgtcacagggacagtaagcaaaaattttactagtgggtcactaggggtgatggtaagtggtgccacttccacttccaccccttgattcctggacctgtgaattccggctatgggagaaacagtaccatatattggatgctgattcagagcatacacaaccttctggagaattttgccccagccctgcaaagtattgtcacctagttgacattgtaattgtgacttcaaaaggccattccatcattctatcaatccagctgcttcaggatgatggggaacatgtaaagaccagtgaattccatatgcatgagcccgctgctgcacttctttagtcgtaaagtgagtgccttggtcaaaggcaatgctgtgtggaataccacgatggtggataaggcattctgtgagtccacagatggtaatcttggcagaagcaatgtgtgcaggataggcaaacccatatccagagtaagtgtctattccagtgaggacaaatcgctgccctttctatgatggaagaggtccaatataatcaacttgccaccaggtagctggctgatcaccctgaggaatggtgccatatcaagggctcagtgttggtctctgctgctggcaaattgggcactcagcagtggctgtagccaggtcagccttggtgagtggaagtccctgttgctgagcccatgtgtaacctccatccctgccaccatggccactttgttcatgggcccattgggtgatgacaggggtggctggggaaagaggctaagtggtgtccacagaacgagtcatcctatccacttgtttattaaaatcctcctctgctgaggccagccgttggtgagcactcacatgggatacaaatatcttcacagtttttgaccactcagagaggtccattcacataccttttccccaaatttctttgtcaccaattttccaatcatgcttcttccaagtccttaaccatccagccaaaccactggctacagcccattaatcagtatataattgcacatccggccatttctccttcatgaaaagtgcacaaccaggtgcactgattgaagttctgtccactgggaagatttcccttcactgctgtccttcaggtatgtcctaggaaggggctgtagtgctgcagctgtccactttcaggtggtggacatatcatgcagaaccatctgtgaaccagtccttagtcttctcttcctcatcaactgatcatagggaactccccatgaggccattgttgcaagctggggaagagaaggaagggcggcaggagtggagaccatgggaatttgagccactacctcatgtaacttacttgtgccttcaggacctgctcgagcccgatcacatatataccacttccatttgatgatggaatgctgctgtgcgcaccccactttatggctagatggatcagaaagcacccagttcatgataggcagttcaggttgcttggtgacttgatgacccatagtcaaatgttcagtttccaccaaagcccagtaataggccaagagctgtctctcaaaaggagagtagttagctgcagaagatggaagggccttgctccaaaatccttgaggtctccactgtgattcacttatgggggcctgccaaaggctccaaatagcatccctatctgccactgacacctcaagcaccattggatctgctgggtcatatggctcgagaaacagagcaacttgcacacagcctggacgtgttgtagagtcttctcctgttctgtactacattaaaaagtgagagccttttgggttactcgataaatgggctggagtaacatacccaaatgaggaatgtgttgcctccaaaatccaatagtcccaaataagcctctttcgtggttgtaggaggggccaaatgcagcaacttatccttcaccttagaaggaatatcttgataggccccactccactggacccctagaaattttactgaggtagaaggttcctgaattttagtcatttattttccatactctggcatgcaaatgtctcaccaataagcccagtgtgtttgctacttctcactcactgggtccaatcagcaaaatgtcatcaaggtaatgaaccagtgtgatatcttatggaagggaaaatcaatcaagttctctccaaacaagattatgacacaaagccggagagttgatatacccctgaggtaggatggtaaagatatattgctggccttgctgactgaaggcaaattgcttctggtgggccttatggacaggaatggagaaaaaggcatttgccaaatcaatggttgcataccaggtaccaagagatgtgttaatttgttcaagcaatgaaaccacatctagtacagcagctgcaattgcagttaccatttggttaaacttatgataatccactgtcattctccaagatccatctgtcttcttcacaggctaaataggagagctgaacggggatgtggtgggaatcacaacccctgcacattttgagtccttgatggtggcactaatctctgcaacccatccagagatgtgatatgttttttgatttactatttttctaggtagaggcagctctaattggtcttcctattttgtcttttccatcataatagccctcactctaccagtcagggagccaatgtgggggttctgctagctgctaagtatacctatgccaattatgcattctggcactggggaaatgaccacaggatgagtccagggacccactggacccactctaagtcagacttcagctaaaactccataagcccctactttaactggaggaccaccaggacgttttcggtcccctggagtcaacgtcagcttagagacactgttcagtagtccctgaaatggcaatcatttccctttccccaatcacagttactctggtaaaaagccgtaggtctccatggggaaggatgggagaaagactaacagcataaattgttgtcagtgtcatccttgtatccctgggataaatcccacttggtcataataagtgatcttttaacagcgtaaattgttgtcaaggggaaccagcctccccttcatttaagggattctaggtctgtaaactggtttaagtctggaaattgattgaggggaaattgatcctctgtttttataattcaaattagtcttttgtccacttgacctggaagttttctgcttatataaattaaataagaatgcaataggcttcctatcattttcacttctaggaacaccatgattaatcaacagatgccagagatctacatgagtcagactattgtgattgctgctttgcctctgctgtccattatggtagctatgcccaccttgcctttgacagttgactggcccctgccacctcgagatccaattattcccattgcatttaagttttgtagttgagtgactgtggttcctactgtaaaatctggcatacagagaagagcaatcacaaagctcttcaaggatgcaggtactcccctcacaaatctattttgcaaagtattagtcaaggatatattttctggatcctcccagctgggatgagtaggtctaaactgactaatccactccaccatcccaatctccctaaaccttttgatcccttcctctacattaaaccaagggagatcaggcatttccagcttgctcacagtgggccatcttttaatccatatttcagctaaccaagcacataaattatcagaacctttttaaactccccaagctgcaacattaaatgcagaatccctgcttagtgggcccaaatcaataaattcagcctgatccaatgccttggatctatgttccatccaccattatcccacacccttaatatccattcctatgcctgtcctccagatttttgcttatataaataagaaagctcaagcagttcttttcgagtgtagcacacctcctcatgggttatactctgaacctcacccctagggccctcctgggactttagtctagttataggtctagaagcaaacaggggtggtggggggtgggtcctgaggagaatcaacattatcttgcctggcaactgcctcaggggaagccatcactgttgcctcaggcagtgcagggtttttctcctcagacaaatgtggaaaggctgatggcagtgtgggttggggaggacatgttgccactactggggatgagaaagctgtttcttctggcaaaaaaagtttcatcagaatttataatctcagtgtccccagcttcatcagggtccttttacatatccccattccaagtttcaggatcccattcttttccaatcaatgccctcatttcaacagtagacacctggcaaggctgtgcatgcacctttcattgcaggtcagccactggtatgataagaacttgtgtccaatttcccgcaatttcagctctttctctacaggagataagactctcactcagggcaatcttagcaggtttgaggttcagtatctgcttctgaagctaggaattagaatccctaagttcatcattttctttcatcactttgtccagtgaacttaggaggaaccaaccaacttcattatgttccttagttccccacatatggtcaaaggtattacatatagagttactaaactccttgcctctcacgaaccgtgcatcaggagtgtcaaatgaatttattttgtgtaactctgtaaacagttcgtgccaaggactatcagtgttctccatactattagaagtacagtccttagcatttttgggtctaatcatattaagcagccttctccagaaaccccaaaaccaatgaaagaactccatccttaatagtctgttcttctggaaccactcctgggaccaaaatctgtattagtcagagctctctagaggacagaactaataggatagatgtatatataaaggggaggttactaaggagtattaactcacatgatcacaaggtcccacaataggccatctgcaagctgaggagcaagcaagccaatccaagtcccaaagctgaagaacttggagtccaatgttcaagggcaggaagcattcagcacaggagaaagatgtaggctgggaggctaagtcagtctaatctctccatgttcttctgcctgtttttattctggctgtgctggcagctgattagattgtgcccacccagattgagggtagatctgcctttcccagtccactgactcaaatgttaatctcctttgatgacaccctcacagatatacccaggaacaatactttgcctcctgtaatccagtcaagttgaccctcagtattaaccagtacactaagtatttttttttttttttgcagctgttgtaaaagggattgagttcttaatttgattctcagcttggttattattggtgtatagcagtgttgctgatttgtgtgcattgattttgtatcctggaactttactgaattcatttatcagatctaggagctttttggatgaatctttagggttttcagagtacatgatcatattgtcagcaaacagcaacagttttaacttcctcttttccaatttggatgccctttatttcttcctcttgtctgattactctggatgagactttcagtactatgttgaatagaagtggtgaaaatgggcatccttgacttattccaggtctcagggggaatgctttcaacttttctccattcaatatgatgttggctgtgggtctgtcatagatggcttttattactttgaggtatgtcccttctatgccaattttcttgagggtttttatcataaagggattttgaattttattaaatgctttttcagcatcaattgaaatgatatatggtttttggtcttcattctgttgatatgatgtatcatattgattgatttgtgtatgttgaatcatccttgtatccctgggataaatcccacttggtcttttaactgtattgttgaattcagtttgctagtattttgttgaggatttttgcatcaatattcatcagatatattggcctggagttttattttattttgatgtgtcattgtttggtatcaggataatactggcctcatagaatcagtttggaagttaacccctcctctactttttggaatagtttgagtaggattggtattagttcttctttaaatgtttggtagaatttggcagtgaagccaatgggtcccaggctttactttgctgggagactttttgttacaactttgatctaattacttgttattggtctgtttaggttttaatttcttcatagatcaaccttggtaagttgtatgtgtctaggaatttatccatttcctctagatttttaaatttattggcatatagtggctcatcatagccactaatgatcctttgaattcctgcagtatcagttgtaatgcctcctttttcagctccgattttatttacttgggtcttctctctttttttcttcattagtctgtttaaaactttgtcaattttatttatcttttcaaaagattgactttttgttttgttgatctcttgtattttcatcatttcaaatatatttctgctttgatctttattattttctctactaattttggattcagtttgctgctgcttttctagttctttaagatgtatagttaggttatttaaaatgaggttttcattcttttccaatgtaggcaattacagctacaaatttccctctaatagtactccttttgttgtatctcataggttttggcatgttgtgtttccattatcatttgtttgaatcaaattttcaatttccttttaaatttctttattgacccactggtcattcaggagcatattgtttaatttccatgtgttcatgtagtttccaaaattccccttttttatttctaattttacttcattgtggtcagagaagaatcttgatatgatatcatttttaaaaaaatattttaggacttgtattgtgactagcatatggtctatctttgagaatgatccacgtgctgagaagaatgtgtattctgcagctgttggatgaaatgctccataactatctattaggtcaatttgttctatagtgcagattaagtctgatgtttctttgttgagtttttgtctgtcagttctgtccaatacggaaagtggggtgttgaattctccacctattattgtattgtgatctctatctctcttttagctctaatactatttgctttttatatctgggtgcttcaatggtgggtgcatatatatttataattgttatatcctcttgctgaattgaccccattatcattgtacaaagaccttctttgtctctttttggagtttttgtcttgagatctattttatctgttataagtgtagttacccctgctcctgttttgtttccattagcaaggaatatcttttcccatgtctttattttccagtctatgtgtatcttcataggtgaagtgtttcttgtgggcaacagatcattgggtcatgttttttcatccattcagccactttatttctttttattggagagtttagtccatttacattcaataatttcatttaagtaggaacttcctcctgccattttgtaatttgttttctcgtggtttcatggtcatctctcccttctttccatcttctttttcatgaaaataattttctctggtggtatgatttaatttcttgttttttattttttgtgtatccattgtatgtttttccatttgaggttacatgaggtttatgacttatcttatgacccattattttaaactgatggcaacttaacagactgcataaacaaaaaacaaacacacaaaaggaagactaataaaagttctacactttaactgtatcctcctgcttttaactttgtgttgtttctctgtgtcttattgtactatgttgtgaaaagttgtcttttttttttttttttttctgagtcagagtcttgctctgctaccaggctggagtgcagtggcctgatcttggctcactgcaacttctgcctcctgggttcaagcgattctcctgccttagcctactgagtagctgggactatgggcacgcaccaccacaacacccacctaatttttatatttttagtagagacggggtttcaccatgttggccaggatagtctcgatctcttgacctagtgatccgcccatcttggcctcccaaagtgctgggattacaggcatgagccaccatgcctggccaggttgttattatttttgaccagttcatcatttactctttctacttaagataagtttacataccacaattacagtgttataatattctgtgtttttctgtatgcctattcttaccagtaagtgtctcggcattgaagagctaggtatttcttatagtctttgcagtctgggcttgtttatccctgtccttcttgagaaggttttccagaaggtttttatttgaaggagcttgggcctcaatcccaataatactgtggtttttgcagactagtagaggtaccatcttggaggtcttgaataagatccagaatgattatctggattgccaggcaaaagcacttgttcttttcccttactttctgtcaaacagtctctttctgtctctctctctctctctctctctctctctcaaggtgctgggccatcttgaactaggggtatggtgatgcaagcactcctgtggcccccactttggattgtgctgggtcagacctatagccagcacagccctgggtcttgtccaaggcctgctgtaaccactacctgactaccacctatgttcactcaaggccctagggctctaagatcagcagggggtgacaccagccaagtttgcatccttccctttagggtagcaagttccccctggccctgggcaggcccagagatgctacttgggagtcagggattggagtcaaaatacttagaaatttgcctgatattttatttgactacggctaagctggcactcaaaccacaagacaaagtctttcccattcttccctcccctttccacaggcagaggtgcctctccctgtggccagtactaccactggtccacagggaatctgcctggccactgctgatgttcacttaaagcttaagggctgttcagttgtgttgtggtgaatgctgccaggcctgggactcttcaaggaagtgggcacccctctgccctggggaagatccaaatatgctttccaggagccaaagcctggacttggggaccccaagagcatgcttgttgctctactccacgtggccaaactggtaccaaaggtgcaagacaaagtcccctttactttttcctctgtttctgtcaaacagaaggagtctttcactgtagccaccacaactaggaatgtgctggatcacacctgaagtcagcacatctcagaacctaaggcccacagtatactacctggatatcactgctggttatttggtgcccaagggctctttagtcagcaggtgattaatcttgccaagactgggtccttcccaccaaggcaatgggttttctatttgtccagggtgtgtctagaaatgtcatccatgagctagggcctggaatgcgggcctcatgactctactcaatgccctatcctactgtggctgagctggtatccaagatgcaagacaaagtcctctttactcttttctctcctctccttaagcagaaggaaggagtgacttttgttgctgcaagcttcactgcctgggattaggggaggggtggcacaagcactcccttagctgccccagctgatgacttcctaggtcatgtgccacccctatccctctggttctgagcccagcccagcactaggagttacctaggaattgcaatccttgtgtcctagactgtctttcaagtttacctagaacctcagagcacttaagcatatagtggtgaggcttgctgagttctgactgctgggatgagtgattcgcctctggccaggcctgttccaaaatctcccttcatgtgcagctgctggctgagtccagcacagtgttgttccctgctacgacagcaccgagtttaatgtaaagttccccagttgctgtgctttacttcctccaagtgcgcagactccccacgttgctcagctgctgctgggggatatgggaggggtgatggtggtgatcccagagtgtctctccaaccctcttcaatgcctcttttagtgatacgttgttaaatctaggtactacgattgctcacctgatgtttggtttttgtaatgacgcttttccgtgtgcagatagttgttacaatttggtgttcatgtggcgggggaggggggggatggtgtaggcttctgttccactatcttgctccacctcaatagtctgatgtgcagaagctctttagtttaattaggccccatttgccaatttttgtttttgctgcaagagcgtttggcatctttgtcatgaaatctttgccagggcctatgcccagaatgatattttctaggttttattctacggtttgtatagttttaggttttacatttaactctttaatccatctcaggctgatttttgttcatgctgaaaggaaggggtccagttttcagtcttctgcatatggttagctagttatcccagcaatattgagtaggaagtcctttctccattgcttgtttttgttgaagatcagataattgtaggtgtgcagctttatttctgggttctctaacctgtcccattggtctatgtgtctgtttttgtattagtaccatgttgttttggttactgtagccttgcagtatagttgaagttgggtagtgtgatgtccttcttgttctttttgcttaggattgctttgactatttgggctcttttttttttccatatgaatgttaggatagtttgtttttctaattctatgaaaaataatattggtagtttgataggaacatcattgaatctgtgaattgctttggacagtatggttatcttaacaatgttgtttcttcctacccatgagcgtggaaggtctttccatttgttttatcatctctgatttctttcagtagtgttttataattctttttatagagatctttcacatccttgattagccatattcctaggtattttctttttgtgtatgtctattgtaaatggcattgtgttcttgatttggccctcagcttggatgttgttggtgtacagaaatgctgatttttgtacattgattttgtatgctgaaactttgctggaggttttatcagatgtaggagctttttggcagagaatatagggttttctaggtataaaattatattgtctgctaagagagataggttgacttcctctctgcctatttggatgccttttatttctttctcttgcctgatttctctggccaggacttccagtaggatgttgaataggagtggtgacagtgggcatccttgtcttattccaagtctcaaggggaatgctttggatggtaccaatccttttaaacttattgaggattgttttagataatgttccatgtgcaattgagaagaatgtatattatgctgctattggctatatgttctatagatgttgctatgatatgaatgtttgtgttccccaaattcataaattgaaacctaattctcatgttgatggtatgaagaggtgagacctttcaaacataattaagtcatgagggcagagccctcatgaatgggattggtgcccttataaaagaggcccagagaggtgccttgcctctttcaccatgtgaggacacagcaaaaatgtgacatccatgaaccaaaaagtggccccctccccagacactaaatctgctggtgcctgaatcatgaactttcaagcctctagaacagtgaaaaataaatctctcttgtttattaactacacagcatatggcattttgttataatatcctgaacagactaagacagatatcgtttaggttagttggtttttagtgttgttcacatctttcatttcctagtgatcttctgcctagttgttgtccattattggaagtggagtattaaagtctccagttatgactattgaattgtctatttctcccttcatttctgccagtttttgcttcatgtgttttggggctctattattagatgcaagtatgtttttagttgctatatcttcctgattggtccttttgtcattataaaatgtccttcttgatttctagtaacactttttgtcttgtctgttttgtctgatattagtgtagtcactccagctatcttgtggttgctgtttgtacaatatatgttttcccattcttttactttcaatctgtttgtatctttgaatctaaaagtgtctcctgcagacaacacatagttggatgttgttttcctaaaaactctagactgacaattctgccttttgattgggttctttaatgtattcacatgatgttactattgatatatttggatttatgtttgttattttactcctttttctatatgttttaattctctttttttcctatacttttcatttactgatttatattaagtgaatattttagaatgtaacatggtaatttttaaaataaattttaaactgtatcttttgagttattttcacagtagtttctctagagtttaccatatatattttagcttattggtatctgcttcagatttatattaacttaattctagtgagatataaatatgttacttctagatagctttatttctcttctgccttttgtattactgttacacatattacatcttgtggtggattgaattgtgggcctcaaaaatatatgtccacatagtaacctttggaacctgtgacctcatttggaaataagtctttgaagacataattatattagagatttggggatgaaattaccctaaattttcaggtgggggctaattccagtgaaaagtttgttttgttttttaaataagagatagaagatggaaaacagacacagaggaaaaggccatgcgaagatggagacagagattggagtgatgtcaacagccaccaacacctggaaaaggcagaaacagattctccgtagagcctctaaagggagtgcaaccttgccaacatcttgagttttaattctcctctccaaacctgggagaaaaactgtcttaagcaacccagtgtgtagtaatttgtcacagcagccacagaaaaccaatgcacatttatagtattatatacccaacaatacatcgctataataattattactttatgtaatcttatattttttagaggcactaagagaaaaaaggagaaaattatatatttatggcatttcttatttgtcattgctagttctattcatttattcttgtggattcatattaccatctggtgtctttttttaatcagatacagctgttctcccacacacctcttttatactgtaattgacaaatttgttatatttctgtatgtttttggtccaacaatagagttctacatactgttttatgcaattcgttagactcaggttttctatttcaccttcgaagtgtggcccttaggccaggagcagtggctcacgcctgtaatcccagcactttgggaggccgaggcggatggatcacaaggtcaagagattgagaccatccttgccaacatggtgaaaccccatctctactaaaaatacaaacattagcttggcatggtggtgtgcgcctgcagtcccagctactcaggaggctgaggcaggagaattgcttacacctgggaggtggaggttgcagggaaccaagatcacgccactgcactccagcctggcgacggagcaagaccaaatctaaaaaaaaaaaaaaaaacaaacaaactgtggcccttagaacttaaagtcatattttggttctcaaatcagttccaagagtaggtgatctagccctttcattctaaacactacacatgtagtactagagtataatattgtatttgcttattttttcagagtcagggtcttgctatgttttctagactggggtgcagtggggcaatcatagctcactctaaccttgaactcttgggctcaagagaatcctcctgcctcagtctcctaagtagctaggactacaggtgcacaccactacacccagctaatgcattttttttttaacacacataaagcacagttttttcacaatagattgacaacgataattcacgtcttttttgctagatgatattaagccacagatcaaaaagtcctagacttttatacttacttgaaaaaaacctcaaatttgctgaatgccattgtattaagagctaatctgtctggtccaatcacataatatatttgcctatattcaagtttcatatttctacatatttgataaacattcacactagattttcctctgtgctgcagacaaaaattttcttcaatggtgtctgaaaagggaggcctgcaaccactaccaaaccactctacctgagattagtttattagatagtgcctaacctgaaataaaaatctgctgatagaacattctgcaaaaaaagctctattatgttatagtagagctcatactatattatggtttcaaaggtaataagaaaaatatcatcagatcatcattatggtagctattttaagggaacttaataaaaatttaacagttatcatcaaacactggccacctcaattttaaacagtaaacacacgaattactcccataaaaattataagcataacaggacacttcttggctactattcaatactgacttggatgttctagataacacaagataagatacatgtgtgaatatctatacacatatagacatatttatagatgtgtgtgtatatatacagtatatatataagattttagaaaggaggataaatatatattacatgataaaacttatagtcaatataattttacacttgtaaaatcccagaaaaccaaaggaaaaaatagaactaaaaaagagttcaatgaaatgattagtttaaaaaaataaatataaaaaatgtaattttcccacataccttcaaaatgtagcaatcccactaagcaaaaagtggtatttctaccaactatagataaatgaaaattcacctttaaatgtctcttatcctccatgaaactcatcaaaaacaacaaaaagtacagcagacaaaaaaaaagtcttatctttaatgaaactttgtaaaacatttgaacctcaaccatgatgtgtatgaagataagttactaagtgccatgaagattggaccaagatatgaaaatgctaggagaggatacctttcactgaagatcttggaaagggttggtatattggtattttctagagtagtgattctcactgagatgcaaaaccaaagactccttgttttggattaaaaagatctaggtacagaggctgagggcagaactctctcattatcctatttgtcaacacaaaataggagagaaggcaggactaaatctgagagtgagcagatgcaccattatttcaagattgaacctaaggatgtggcaaggtaaggagaaaagtcaggatgacaagttgccctgtagccgccagttctcatcagttgaagatatattaaaactatggtacacataagccactccatcaaacagtaaatatggctatactgcaagcagtaaaaaagtgaacaggctctgcttccatacagtcaagaacaaaaagaaacacttgacaaggttgagaaaaataaatggaaaaaaataaagaatttaaaagaactggagagaaaactgtagctttggaatacagaaaaaggagatacagcatactgctaatagatgtcctcaaagagaccaaatacatagacaaggggaaaaaatccaaagacatcattcaagaaaaaattttgagatacaaataaacttcagacttttacttccagcaatggaaatccagtttgtcttcagccagtggcatatctcagacaataggcaagccatgagaatggttgttggactgcagtttcggactctattactacatgtatagtatttagaataaaagagctaggtctcctcatgtcagcacttatttgaccaatgggagtatgattttaagtttttagggtcacactttgaaggtggaatataaaaaaaattatagaaagataaatttttgttcagatgcatctactgcagcaatttgggaggctaaggtgaaaggatcgtttgagcccagaagtttgagaccagctgggcaacatagtgagaccttgtctctacaaaaaattaaaaattagctgggcgtgggggcgcttggcctagaagttcaaggacagtttgggcaacatagtgggaccctatctttataaaatatttttaaaaattagttgggcatggtggtgtgtgcctataatcctggctacttgggaggctggggtgggaggatcacctgagcccagagaggtaggggctgcagtgagccatcttcacaccactgcactccagcctggatgatgaagtgagattctgtcccaaaaaaaggacaaaatgaaatatcagcaatgaaaggtcctgctaaagagaaggtttgttaattcataattttaatgtttatctggtcatcttatccaaaaggcaaaaatctttagcctcccttatctttgggatatcgttctctcttaaatgttgctttctcacaaatcccaatttacttgaataagaatgcaatgttatgccaaaagttagggaggcatatggtgggacaaatcctactgggtggatggtttcttcattcttttcacaaatgaaatcttctgaaaatagacgtcagtggcagtttaaatagagaaatgggaaaaagggaagccaaaaatctgagaagcgtgtgaaagaggaggagtttctgtgaagatttcccatactgttctctgtatgcatttttccttttttcctcacgccctaatctatacccacacatactatccctctaggtgcagctcagaattcctaaacctggtataattggaggcatggctgcagacctaaaagttcggtacatctttacagttgtatttcatctgtttaaggcagaaagaataaattttcattccaaagcagttagcttgcttagcagcattaatttaaaatgaagaaatgcacatcctaatctctggcactgaagcagaaaattagttttggtttagaaatttggtgaagaataagttcaatttttatgggctgttttgcatcctggtgagatctaatgaggtctgtacttgtgactacctaataggctgacatgtttcctcctttaattttatctgagacttggtgtcaatgattttttggtttcttaattcaaaaaggcaaactagccaaggggtatttactacttatattgccttatatcacagtgtgccctttctagttccctagaagagataacgaatgggtttgtgtgtttagggaggtaactggtttttagtggaacactggcattatcaatcccactcttagtgttaaaaagagaatgcccgagctacccctctccccaccattttaatcagcaatttttaaatgttttcaaatattatagaaatatgcaggctgatgccaggtgcggtggcatggggctcacacctgtaatcccagcactttgggaggccgaggcaggccaatcacttgaggtcaggagttcgagaccagcttgtgcaacatggcgaaacctcacctctaataaaaatacaaaaattaaccgagcatggtggtgcgcgcttgtagtcctagctacttaggaggctgaggcaagagaatcgcttgaacctgggagggggaggttgcagggagctcagatcgtgccactgcactccagcctgggtgacagagcaagaacctgtctcaaaaaaaaaaataaaataaaataaaataaaataaaataaaataaaaagttaaaaaaaaaatgcaaggtgagtgcagtggctcatgtctgtaatcctagcactttaggaggctgagataagatgggaggatcgcttgagcccagaagtttgagaccagactgggcaacaaagcaacacgctcatctggaaaggaaggaaggaaggaaggaaggagggaaggaaggaaggaaaaaaaatttcaaacatacacaaaagttgagagaattgtgtaattgaccccaatgtaccatcacccagcttcaataattatcgatacttttaggcaggtttctaccagaaaatatgtcctggaaactttaattcttgatctgtgttcagattttgcctttcaaatgtttcattattggggctttggacatattgcacctgtattaaaagaaggatttgagtgaggaatttagtgcttcatagtcaatagtcaatgagtctccttttggctcgcctccttcttagggaaaggaactggttgtagggtgttaggcagaatttgggtgtatctgttgtggctcagagatgtttctcatagaactgatcactgtcccaatatccacgcaaaagaccaaattaaaagcgaggagaaatacctaatgtaaatgacaagttaatgggtgcagcacaccaacatggcgcatgtatacatatgtaacaaacctgcacgttgtgcacatgtaccctagaacttaaagtataataataataataataataataataataataataaagcgagggtgggtatctagcctattcttatcctgcctcatggtgttttctaaatatttacagaaagaaaatttacagagtagtttcctggtcaaactctaatgagtatctcagtactttcccctccacttctcacgtcttctttggggacgggtcgtcaagtctttgagtttctagttattgctattgactggtttataacctcctctttcacccagatcgtcaagggccgtttgcaaagcactcccaagtagagcctcttggagaaggagaaactgctatcacgcaaaaaaaaagccttgagctcgctggctccgctgcctcgaaaagccagagtccggaggcagtttgatgcggacactattccccaaccttcttcccctccttgtcgtctctattgccctcttggcagctcctgggatacaagagggtgcaggacagacttcaacccgcagcaggatccagcgcggaaagctctgcagcaggatccagcgcggaaagccccccgcagcacttctttcggggggctcctgtttccttaagcctagaaggtgtggtcgctcacgttcaccgtcccgcctctcgccgcctccgctcggcagctccacgctgagtcccgccctctccgccggagaggtgcgccggggtcagagcgccgggacccgacgcgcggctcccaaagggcggcaggaagagcccagctgggctcagccacagttatcagcaatctgcgggcagaggatgtggaggttaagatctgggcagcctcagggcgttgtcctagaaaacaccgtttaaggagagaagtgttagtgtctcggggcgtctcccaggctccgccctgcgcccgcagccagcgtggtggtcgagaccccagcccgctgctactggagacagcacctctcgcgcccgggcgggcggcctcgtctctgcacccctaggcggcgctgcgctcctcaacacccggccggctccgctttcccagacggctgcccagcctccagcctagcaagcccggctcccagctggccagccccggcaatgccggcgttcgggaggcgcaacgtcggcggtcgctgagtatccagcccgcagcagtgacggccggcaggagcgtgctcttccccgcggctcgtgctctccaggagtccggagcatggtcctgggtcaccgttggtgtagcgtgttggtggaacgtggacgcctagagggaggatggtgggctgtggggtggcagttttatgtttgtgggtttcctgcggcgctgcagcgggacagctcgagtactcagtgccggaggagacggagcggggcgtagccgtaggcaatctctccgcggacttgaggctgccagcggccgctatgtcctcgcggaactttcgcttcctttccagccaccgcgagctctacttcggggtggatctacccagcggcaatttggtggtcagagagccggcggaccgcgaacagctgtgcagggccaaagctgcctgcgtcttgacctacgacctggtgctcgaggacccgctggagctgcacaagattcggattcacgtcctggacaccaatgacaactcacctctctttcctgccggcgacgtgcagctgcacatccccgagttcctgacgcccggagcccgctttactctcccgaatgcccaagatgacgacgagggaagcaatgggatactaagctacagcctaagccccagtcagcactttcgcctggacatgggatcgcgggttgacggcagcgaatacccggagttggtgttggagaaagcactggatcgcgaacagcgcgccacccacctgctggtgcttacagctcgggacggcgggctacctgcccgctcaggagacgcacaagtcaccatcattgtggtggacacaaatgacaacgcgcctgtatttgagcgctccgtataccgcaccaaggttccagagactgcacccaatgggactgtgttattccgagttcaagccttggatccagatgaagggtccaatggggaagtccagtactccctaagcaacagcacgcaagcagagctgcgacaccgctttcacgtgcaccctaaaagtggggaggtgcaagtagctgcttcactaggtccgcctgaaacgctcttggaggcatacattgaggcgagggacgaaggtgtctttggtttagctagcaccgctaaactgctggtggaggtgactgacgtgaacgatcatgcccccgaactggacttcctgactctttcgaacccagtacctgaggacgctgcccctggcacagtgattgctctctttagtgtaaaggatgaagacctcgattctaatggtagggtcatttgtggcatgtctagtgcaggcccttttcagctgacggcttcctttgacaactactacagcctgctgattgatgggcccctggaccgggagcagatcagtgaataccaagtcctgatcacggcctcagatagtggctcacccccacttagcacccgaaggacaatcactgtgtcagttgctgatgtgaatgacaatacaccaaactttcctcaaccccagcaggaacttttcgttgctgaaaacaatggccctggggcctctctaggccgagtgtttgcccaggaccccgacctggggaagaatggccttgtctcttatgagctgttggatgttatctctgaagggccatcagcctctagcttgctggcagtggaatcatccagtggggccatcactgccaaaacttcctttgactttgagcagctcagggggtttcatttccaagtagaaggccgggatggtggcattcctcccagaagtgcaacagtgactataaacttgtttgtggtagataggaatgacaattatccggttatcttgtttcccttgcccagaaatggttctgtcccagtggaaattgtgccccgctctgccaggactggacacttggtcacaaaagtggtagcagaggatgctgacagtggttctaatgcctggctttcctaccacatctcccgggcgtctgactctagtctctttagaatttcagccaatataggtgagctccgtactgctcgcttagttcttcccactgatgcagttaagcagagggtggtggtagtggttcgggaccatggagacccaccactttcctcctctgtcactctgggtgtgctgttgagcaactctgtccctcagttacttccagactttgaagatgtctgggaaccaggagggcagctttctgcccagaacttgtatttagtaattgccttggcttgtatttcctttttatttctggggtgcttacttttcttcgtgtgtaccaagttgcaccagagcccaggctgttgcgctcagagctgctgtcgctctacagaggatctgaggtatggaagtaagatggtttcaaatccttgcatgacatcagccaccatagatgtcactacagttgagagactttctcagacttatctctatcgggcctctctgggacttggttctgataataacagtttgctgttgcgtggggagtacaatgctgccgacctgcgaaatcttgccactggggtaggactgaatttgccaatatcctgtattcagattcggaataggaaaggggatcacgctaatgtcaatgccatggtaagcaaattttatggaatttgattcctttggcccggagatggctgctagctgtgttttgaaatatttcttagacaagcctttcacaacatttcatcaattgaactaaacactccttcttagcacttcctgtgccaagaaatctggaagtatagaagtattagaagattgccctaggcctcaagggacttatagtttatttttgagaaacaagggcaaaaattaaaacctatttaagaacaataaaagtaatatgacataaaggtctaaaattaaaaataaaataccaaaatattttataagcaacagatgtgtaaggcactctaatatttaaagtgaagaatgaaaaatatgtaagagtctgctttatatgaatataatatggaaggtgaaacatttacttaaactattgcaatgcattattaaaagatgacgataaccacaaaagatgtaaaaataaattacaatgggggttaaaagaagggagaaagggaacataagagaacatttgagtgaggaggaaggagtcagagaaggctttgtgatagagatcacagatttagttggatctttaatacgatataccatttaataaaaaacagtgtattctctagcctatacttttaatgaataccattttggtgaaggtgtcttctttgggaatgacaccctaaaacatagctgatagctccatagcagtgttttgtaactgctttggagtttttgcttacacaaaaactgtaagcctctctcataacatctatttatactgataggagatcatattgttggatataggacttgacaaccttttgttttgtgtttctattgataatattttacaaagaggaaagatgagtaatttttatgtcagaaatatttatgtgttcaaaggtgcacttaccatccaaagtccattcaacttggatttaatttcttttattttaggggacaaatacacttaacaaataagtaaatatcatatttgagagtaatgtatctaatgaaagttaagtgattcaaatatttcaatttatctgttagtggcccttggcatttcaaaacttcttttttttttttgagacaggggtctcactatgttgcccaggctggtctcaaactcctagcctcaagtgatcctcccacctaggcctcccaaagtgctgggattacaggcatgagccactgcagctggccctcaaacttcttgagtgcagttaggacaacattttgaagcaattctacggtattactttttgacttctcatagaaatcctagatgcaagagaaggaggtgtgtagaaattaaggaaggaaaatgaagcattccttgttttactattctaggcaataaggggaaaagtggcttgtaagttattcttcctcaagtaatgatgttaactgcaaataaaataaatttacatatgttaaaattttctgtacttaatattttcacaatataatagaatccagcatataagatatgcttagtaaatgctgactgaatgaataaatatgtgcatatatgaattggatggtaacactgttcaacacagagggaaaaactttaacttacttttctactttagatgtgtatatgtggttaacagtttaaaggtcactttcaaatgtactgtttcaatgattattttcttcctcatgacctacactaataacataacagaggaattttctgattgtagagctagcaagaaaaacttcaatgctgtgtctgggactaagtatgagtccagttctacagatgacaaaggaattaataggtatgcacatcattacattgtgatatttgcagtggatactatttaatagaatctcagttaattttagggaaggaaattggtgcactacaatgctagtatttcaggtatcagagcacttaatatgtgaacacttttcctaccaagaaatttcactatttatttcttttattttcattgctttctgtaacaaaaagagaggagaataccagtaatggctgtaaagtttgggagtgaggaattttttttagaaacacattttcactagactagaaaggaaacataagtaagcgataggaaggctgatgaatctagaagttagaaggaaaattagctatttaaaaggaaaaatataggaatgacagaggaaaaaacaacccttcaaaccaaatttttaaacatatatgaatgattaacaaaataatagagatatactgttcatatgtgcaggaatattgtaccatcccattcattcagttgaacagtctttttccatcattgttgatattttgctttttaggtagctcattggtctgctaataattgttgtgggctggatatttccttataaataaatgaattgtgattcataaaaccatgaataaaataacttctataaatatggggtatttgtaattcacaaaggcatttgttatttacttcttcctgttcaattacctattgatctgatcttaattctttagaaaagaattcttgtcatagtatcctgaatgccttaataacaacaggattctagaaataaaatatttattgctttcattttatttcaaatcatttgaaaagcatgacatttaacaatgattataatgtgtgtctgagtcttacagaatcatgttgatgcatatgtgtttatattttgctcaaattctaagttctttcattttagtttacggtaagtttacagtatatattaacatagcctgtaatactaaaaattatcagtttaagaaattcaggaaaacatggtttttatctctgtatttccaattgataatatttaagatataaacaaaattgattcactgattgtataacaattagacaatgtgtacctcatgtccatttttttctgttaatattcttgatgggcaatttaaattttttagaatggtatctaagagggtacctctgagatataaatttctacttattaaaaactgcattgacaatttttaaaggtataaatatattaatgtagcaaaaatgcatgaaacacttaccatacaactggccttattaaatttccacatgaaagttatacatagtttcaacataccaatgttatattagtgtattgttcacctggaattaaagcatcttcttttttgccagggtatataggaaataggatatctcctctttgcaatgtcatttgttaacagtagtagaatgtttgtggcattcaaggtgctttatttaacatacattccacaagtagactttcccatagggtaattagatgttttgtatatctattttgactttgaagctgataaccacactaaaaaactttagaatgatgaaactaaggaagtttgcatgacatatgaaatatattcaaattaaaaaactcatatagacaacacaataatattgtataatatagaccctcaaatcagtaaaaaggaaagaaaaagaacattataatttgagtggacataagagaaaagcaataccttggaaacatataagtgggaaagtattgacaatgtgtctcataatgttaatgacttattgtcttttgttgtcttcaatattttcagttagagggaaacaataatatttcaacaactaaattaacttagctaggttggaatgaaggtggactaaattgctgaaaggtttttacaatgctcaaatgcatgtcatatgaatatcggaaatattaacacttggcagaacttcaagtgaatatggattacagtccaggatcctgactaaagtattatgggaagtaaggaatttgttggtaaaggttgttcttaagaaacaaagctaaataataaaggtagatagccactcattttgttcccaattttaattgatggcataagataatggttcaggatataaataaattacatgtctgttatattgcatttatgaaaaagaaaggactataaacacaaaaggttattatatattcatttggaacttgttttggaatctggaaataaatatgcaatctcgtattctcctgtgctgtagagaaagataaacactttatttctaacccatcccaaattccttggctgttcctagagccatctggttaccatctacagatattctgtgttcataggggcactctaatgacataccttcaaaatatactctgaattcaaacacattatggttattctttagaattgttaagcaaagactacagctgttttgtttaaactcaaaataatgttaatataaaataaaaaccaattaagaagtcttaatagtgggtttttaggttgatttgtctttttcttttcttattaggttaggctggccctgttaaacaagttggaaatcctgtctctctctctgtctctctcacattttttttcctattcctcggacacatttactgagattggtgatacagctttcttaaatatttggtagaattcactagtgaagctctctgtacctacagttttctttgtaggaaaattttaattgagatcaaatttctttgtatttttattgctcctatttcattcctgtacctttaattttttcagatatatgttagttttatctgtacttttgaatattttggcataaagttgtttataatgtcctgttgtgactttttttcacatctgcaggatctgtagtgatgtttcccttttcaatcctggtgttagtgtcacctctcatttttcttgactagacttggaagtagtttattaatgatattagtctttccaaggctaacttttggtgttttgggttcgctttgttgtatgtttgctttctattttattaattttcatactttattaatttatttccttccttatatgtttatatttcagtgtgcaacagaagtactctaaacatacttttcatttctatttcctcacacaaaatgtttaaaagatttgtacttaattgtggagatttatcaaaattaataataatcagtgcttcatcaagggcattcttactggtatttttcttactgcaaatgtccaatcatgaatgtaataaccaccagtacagtgtggagccactgctttgactccttctgtggttctatggtggccagctttacccaccaatgcttttgcattatcaatgcaagtgtaaatatagtgaaaaatgcaaataatgttttaacattattttgaaaattatattcacctcataaacacccaaagggtccatagaccacacttcgagagctaccgttctaattctatcatttcttcttttttttaattaattgtaacatttctgtaatgggtcttcaactatttgattagcctgaggtacagttcacacaggaaaggcaggataaatgtttgattcttcccctttgtttagcagtattcaaaacaatgaattgattcctggccatcttacaaaaaggaccaaggccttttttaggtgtcattatgaactcattgacttaaacatatttgatatggcccaatccatgtcaattatctttttaatgatcaaattatgctaactttggcaagttgggaactgttcagctttgctcctgagtctttgtgagtgtgtttgtgtatcttgttttaaaccttttattttggaataattatggattcacataaagttacaaaactagtatagagagatcccatgtgcttgtcacccacttttccccagtgataacaccctgaatccttttcatgtgagtcttaatagtcttttgaatgcttccttgatttctggtattacaagatgttcagattatcttgtacatttcctttcccagaatcagccatttttcaaagagctttcacttatttttagtgaaagatgatacttagagatataatctcaacaacaggtgtgcttattgctgctgggtcagttgctgtttctaggtatcttcagctactgagctaagggatgtctattttttaaaagataaaatacatcacatgtttatactaatctaataaagttcagcactccgaggtttttacttaacttcatcaatcttacattcctatttctcccatacgtcaaatcccagttttcattaacgtcaacagaattactcatttgttatcccacgggactcaaacaatggacttagaaaacaatttcagcactacagaaataatatgatactgtagcagtttaagtttttgtcattcttttcatttataaggcacatccttacaaatgcccagtaggcatgtacagtcaaattattgtgttttaaagtatcttggaaaagttcctctctgtgtagttaagccaccagctagatacagagctaggcttttttcaagtcgctttcaaatttagggcttgctttttaaattttaattttcttttataattatgtgaaatatttacatggctccaaaataaacttataaaacaaaatatatttagagaagtctagtatctattattccatacaatacacattcttccccactttgagttttttcacttaaaaatataaacgagattatttcatagtagtatagtatttacacatattccatactgcttaatggtgtcttttgattagcaattaatgagctccaatttatcaatattatcttttttttttttttttgagacagattctcattctgttgcccaggctggagtaaagtggtacaatcttggctcactgcaatctctgcctcccgggttcaagcgattctcccacctcagcctcccgagtagcggggattacaggcacccaccaccacacccggctaatttttatacttttagtagagacagggtttcaccatgttggccaggctggtctcgaactcctgaccttaagtgatctgcccgccttggcctcctaaagtgctgggattagaggcctaaaccaccacgcccagccaaagttgtcttttttatttagtattctttctatccttttaaagaaaacatatcctgcttcaagtcatgaagatatattcctgtgttttcttctataacattgctatccaatagaactttctgacatgctataaattttctctatctgcatatatggaatgtgtagctactgagcacttgaaatgtggctagtgaaactgggctactcaatttttaatgttactaattttaattaatttaagcttaaataaccacatctgtttagtggttgctgtagttctggaagctttcttgttttaacttgcacatttagatcttaaattacctgaaattgcttttgaatatagtgcaatgtagaagtcaagatttatattttccacttgtaaatccagttagattgcctactttcctcgctgctactgtgcagtgctacctttgtcataagcaacgtgactttatatattctgtttctggactgtctattctgtttcattggtcaacttgtctattcttgtgccaatacattctgtgttaaatatagtaacttttcatttgtattgatatctaattgtgtaagttctctcactttgttattctgcttcaagattaacttagctatttttggccctttgcatttctatataaattgtagattcagcttctcagtttctattttaaaaaaccctgctttgattttaattggcactatattgaatctgtagaaaatatggggtatattgaaaatatcttattttgatctttattgaatctataaaaatatgaagcttgttaacattgacaatattgagacagacaaccgattaacaaggtatattcttccatttatcttttttttttttttttgagacggagtctcgctctgtcgcccaggctggagtgcagtggcgcagtctcggctcactgcaagctccgcctcccgggttcatgccattctcctgcctcagcctcccgagtagctgggactacaggcgcccgccaccatgcccggctaattttttgtattttttgtagagacggggtttcaccgtgttagccaggatggtctcgatctcctgacctcgtgattcacccgcttcggcctcccaaagtgctgggattacaggcgtgagccaccgcgcccggcttcttccatttattttattattttatcttaatgtttatgtgtgtgtatgtgtatataggggtattgcacaacttttattagatagctgatattttaatgctattttaaaagtttaattttataatacaaaaattagctggacatgttggcacatacccgtaatcccagctactcaggaggctgaggcaggagaattgcttgaacctgcgaggcagaggttgcagtgagctgggatcgcgtcactgcactctagcctgggcaacagagtgatactccatctaaaaagaaaaagaaaggcagggcatggtggctcacgcctgtaatcccagcactttgggaggctgaggcaggcggatcacgaggtcaggagatcaagaccatcctggctaacacggtgaaaccccgtctctactaaaaatacaaaaaattagtcgggcgtggtggcgggcgtatgtagtcccagctactcgggaagctgaggcaggagaatggcatgaacctggaaggcggaacttggagtgagccgagatcgcgccactgcactccagcctgggcgacagagtgagactccgtctcaaaaaaaaaaaaaaaagtttaatttgataattggcttttgttgaaagtatatagaaataatactgattttatgttaactttgtatccaatgttcttgctaaatagtaaaatctcatatttttatattttgggttttctacatatactgtcatgctattcccaaataatgttagttttattattgtattttttactttctctctttttttaaaaaaatagagatagagtctcactacattgcccaggctagtctggagctcctgggctcaagcaatcctcccacgccagcctcccaaagtgctgggattacaggcataggccaccatgcctggtcttttaaaaactttctaatcacatagttttcttgctttctgtcattgcctatgaaattcagtataaaattgaatagaagtaatgttaatggataatcttgtcttattcctggtctcagagaggaagtttttaaatatttaatatgaaatacattgtttgattgggtttatttgcaaaaatcctttatcagatttattaagttccctttgttttttaatttattatgttttttaaaaatcatgaataggcattgaatttatcacatattttctgttattgaatggataatatggatttttatccttttattaatagcatgcattatattggttgatttgttaatgataaaccaatcttgcattcttggaataaactcaggttgcttatgatgtataatccttctttatatcattagacttagtttcctaacattttctttacagtttttaaatatatgtttatgatagaaacgcgtttctacagaaaaaaataattatttttaaaggcatagttattgggtactagacttagtacctgaatgatgaaataatcggtaccacaaacccctgtgacatgagtttgcgttataacaaacctgcccatgtacccctgaacttaaaagttaagaagcaacacacacacacacagatgcgcacacacacacacgcacaagaaattggcttttaactttccattcttataatgctctagtcggagtttggcatcaaggctatcctggctttatatagtaagttaagaagtgttacttttcttttacttattcggaagagttgtcttagtccatttgggctgctatatcaaaatagcataaactgggtggcttaaaaacaatagaaatttatttttcacaattctggaagctggaaagttgatgatcaaggtcctggcagatttgtgtctggtaatggcccactccctggttcataaaacagaatgtcaccttcttgctgtctcttcaccttctggaaggagcaaggtagctctctggaacctcttttatgagagctgtgccctcgtgatctaatcatctctacaaaagccctacctcctaatatcataatcttaggggttagcatttcaacttatgattgcaaaggaggagggaacacaaacattcagatcatagcaagtttgtgtaaatcagcatttttttcttccataagcatttgaagaattaagagtgaaatttataggcctagaattctcttcatgagaatgttaattataaattcaatgtctataacattaatagttatagaattatacagagcctctatttcttgttgtattagtttggttaatcaaaatggaaaattttaacataccttgctcaaaaacagaacaaggagacaaaagaaaatcaataagggtactgaaaacttcaataacaggaataaccaacttgtatgtatgtgtgtgttgctggacattatcatttgtgagatacatttatattgttgtgtgtagctgtgtatcattcattgtcattatatagtatttcagggtgtgaatggtcaatttctataaatgttctgcatgttcaagaaaaagcagtattctgacattgcttgttgttgtgttctgtatatgtccattaggtcatctttgctagttgtgttgttcaaatattctgcattcttttttattctttttgtttgcttattttatcagttactgagaaaattatgttaaagtgttccacgatgaatagtgaattgtttctccttggattttgtcaattttttgtgtcatatgttttaaggctattttattttattagattcttaaccaaatataaatatgtgatatctttctgctaaattgaaacttttagcgttatgtattatttacctctatttctgctagtgataaactattatagtttttgtttgcctgaaatgtcattcttgatagatatttttacatgggtgtaaaattcaagattggcatttatttcattttggtacattaaagttacctcctcaatatcttctgggttccactgttgtctcattgtgctgcttcatcagtaatttattatctttcttccaattttactaattttgtcttcttgtgtgtccaacatgctattaaaagtattccttgagttgttaattttggttattgtgtttttcattttaaaaattataattattactgatcaagtctgccatgatattttttataggtttctgttccctgcaattttttttttcaagacaagtcttgctccgtcgctcaggcgtgatcatagctcactgcaatcttgaattcctgggctcaagtgattctcctaccttggctcccaaagtgttgggatttcaggcatgagccgctgctcctggctcctgcaaatattcttaagcttgtcatttatttatttaaatatattaaatcttcatctgataattccagagtctgaagtctgcaagtgtatacctgctgtgtgctgtttcagctggacagctccatatttttatgtgtgccaacttttatttgacttttgatggtccatatcctgaaaatgatatttgccaggatatcctgagatcttggatggaaatacctttcttcacgatagatttttatacaccttccagtgagtgaatactactgctagtaaaccactttaaatcaagttcaagacttgaagctccttggctacttagactacgtattctcagataaaaatatgcaggatatctggtatctagttacaagtttataggattaaattttcctttcctattttccttctggcctttttggtgccaagtcaaattccccagcagttttctgggctggagagtaggtgggtttagttttcacatactattactggaaagattagtcctttgaagttccagcttaatgtagtttggaggccccataagactccccatcttgaacatcctgcttctttttttttctttcttcctttctttcttcctttctttctttctttctttctttctttctttctttctttctctttctttctttctttccttccttcctttctctttctttctttctttctttttcttctttctctttttttttttttttcagatggagtcttgctctgttgcctaggctggagtgtagtgacaggattttggctcactgcaacctccgcctcccgggttcaagcaattctctgcctcagcctcgggagtagctgggattacaggcgcccaccaccacgcctggctaattttttgtatttttagtagagacgaggtttcaccatcttgaccaggctggtcttgaactcctgacctcgtgatccattcgcctcagcctcccaaagtgctgggattacagccatgagccatggtgcccagcccatcctgcttcttaatttctgtcttcctacaacttatgtccaattttatgtcaagttcaatattctgtttacctctttgggcttagctttcctccacaatttgtcctagcagttccccattatcttatcagattttcagtgcttttaagataattgttttaatgttttacccaagaatatttagttgatttcagtaggatgactgctgtaaataatttaggctgccattacctgatattccctatcatagagttctatcaccagtgactagcatctaagtaacattgaaatgcttttatgtatatcttaaaatatttgaattacttttgttttgaaaacaatagtatctttactttccctaaaccttgataagggattcatatctcttattattaattttgggaaaaaataattcataaacctggtctattatgaaatgtttgctaattgagccaagagagcacatgcattcatctaaaacattcatataatcaaactttattaaaggtgatatttgtggctttacttgacataaaacagcttccatatttctctattccagacattttatttaaaatacatttttgagcataagatatttaaaatgtgtaggcaaataagatatccatatcattaaaagatatctaaagctggtaatggtggctcatgcctgtaatcctagctacttgggaggtcgaggcacaagaatcacttgaaccagagggaggcggaggttgcagttaacggagattgcaccactgcattccagcctgggcgacagatgagactctgtttaaaaaaaaaaaagatatctaacaataaacaagtaaactatcaattataatacaatcaaattcaagctacaactgaaataaatacatggtatctaggaaactcagaggggaagcaactaactcagtatggtggggggtagggggttgaggcagaaaaatcttcccatataggatgtcacatataattatagtgtttatatttgccaattgtaaaaaaaaaaatggcaaaagagatctcattcagaaaagcaataagcacaaaagttttaggaataactttaatgagaaatatgaagtaaaagtatgaaattttgttgaaaaatattttaaaatcttgtataaatgagatggcataatgtatttttaggcagaatattacaaaggcatgttttccacaaactagttggatttggccctgtgtcaataaaaattccagtaagatgattattttgctttagcatgacaacttttttcctaaaatttatctctaagaataagcgtgaagaaaaaaaaaattgaaaaagagtttaaagtgtagacgttctgttatcagaattaaattttggggctgggtgtggtggctcatgcctgtaatcccagcactttgggaggctgaggtgggtggatcatttgaggtcaggagttcaagaacagcctgaccaacatggtgaaatcctgcctctactaaaaaatacaaaaattagccaggtgtggtagtgggtgcctgtagtcccagctactctggaggctgaggcaggaaaatcgcttgaaccctggaggtggaggctgcagtaagccaagatcatgccactgcactccagcctgggtcacagagtgagactctgtctcaaaaaaaaaaaaaaaaaaaagaaagaaagaattaaattttgggaagtcattattagcaatattgtgtagtatccattggacaggatgagagtagaggaaaggagatcattaaaatatacaggtaagaaattatggatatttaaattcagactagaggcaagggctttaatatgatataaaggatagaattgataaggctaaatgtgggagatacagtaaaataataaatagatgctatcaaggttcatggaaatgttgagttcagtatgcaaaatgtcatgtaaatagacgtagacaataatcattttaatttgttgatctgagtggggctgaattctaaatatagactttgattcatctgcataaggaagctggattatggataaaaccatctatgaacaatgtataaagtgtgaaaaaaagggataaggtcaaaatattgtggaacacatttaaaggtctgagagaatgaaagtccacagtctaaaagcagtaggagatgtaggaaaaaaactaggaagtggtcctttatgcaaagcaaaagaggaaagtttgaagaaaatgagttgattgaagttgtaagatgtcacagaagtcaagaagaggtctctgaagtgttcattggactggtcattatgatgtcatgagcactttagcatgagcagctttagaagtgtggttataggagaagcagtgaattaaagagttaaagtaattaagaaaacagagacagaactactgagtaccccccaaaagcaattatcttcaaaatatggaaaaccagattgggatacaaaaaggtttcttgttaaagataaaggaggcctgagtaagtttatatctcatgggaaaatggtaccagagaagaaaaggttgaagattagaagagttgaaaattaaagggccaaggctggttttttgttggtttgttttgttttgttttgtttttaaagagggttttactctgtcgctcaggctggagtgcagtgatgtgatcactgctcactgcagccttgacaccccgggctcaagcgatcctcctacctcagcctcctgagtagctgggattacaagcacgtgccaccacacctggctaatttttaattttttatagagatggagtctcactgtgttatccaggctggtctcgaactcctgatctgaagtggtctgcctgcctcggcctcccaaagtgctgggattacaggtatgaggcactggactgaggcttcttaaatggtggcaaggaacatattttgtgctttaaatgatttaagtatttaaagatcatagttttcctggcaacttactgtagagatcacttcagaatttccctgggtagagtagtgtgctgtagaagtatagtgttgtaagccagtgtggattgggagtccataccccttatttatctattctgtgtatcctattaataacagtaattatcaggttattttgcctttgaacaccttagtaagtctgagcatttacatggaaaaaatgctgggtttattcctcctgttattgtattttacaagtctgtcgagggtccacagtgatctttgccccataattgtaaaatgagatattagaatcatccttatttatcttaaccacctactccactgtacagttcctataattccacaaacttctctttatattggtttatgccttctttagatgattgtgaataagagtattatcttaacctctctggtgggtctacttctgtaacggttgtgggtcatgaattattttttactcagacataattatctttggtcttatataaagaaaaccctacagactccaccaaaacactcttggaactaataaacaaaataaagttgaaagataaaaaatcaacttacaaaaatcaatagcatttctatacactattgaactatctgaaaaataaatcaagaaaaccatgctatttacaatagctatgagaaaataaaaatacttaggaataaatttaaccaagaggatgaaagacctgcaagttgaaaactttaaaacattgatgaaagaaattgaagaagacacaaataaatggaaatatattttatgttcatagcttggaaaaattaatactgtttaaaatgtccatattacccaaagcaatatacaaattcaatacaattcgtatcaaaatttcaatgaagtttttacagaaatataaaaaacttccctaaaatttgcatggaaccacaaaacaccccaaatacccaaagcaatattgagcaaagtaaataaataaataaaacaaaacatacaaacaaaaaaatgaagctgaagacatcatactacctggcttcaaaatatacttcaaagctataataatcaaaacagcatggtactggcataaaagacatgtagaccaatggagcagaatacagctcccagaaataaatccacacagttactgtccactgatttgcaacaaaagtatcaagaatatacaatggaaaaaggacagcctcttcaataaatggtggtgggacaatttgatatccagatgcagaaaaatgaaactagacccttatctcacactgtatacaaaagtcaactcaaaatggattaaagacttaaacatagacctgaaattgtaaaactaacaaagaaaacacagtgggaaagatgaaagatcaataacactgatctgagcaatgatgttttttatatgaccctgaaagcacaggcaataaaagcaaaaatagactaatggattgcatcaaactaaaaagctcctgcgcagcaaagaaaacaagagtgaagggacaatccacagaatgggagaaaatatttgcaaaccacagatctgataaggagttaacataccaaatatataaggaactcaaacaactcaatagtaagaaaacaaataacacgatttaaaagatgggtaaaggatgtgaatagacatttctcaaaagaaagcacacaaatgaccaacaggtatactaaaaaatgctcaacatcatgaatcatcagaaaaatgcgaattaaaaccccaatgagatatcacctcacacctggtagaatggctattattgaaagaggaaagataacaagtgatggagaggatgtggagaaaagggaactcttgcacacggttggtaggaatgtaaattagtacaatcatagaaaacaatatggaggttactcaaaaattgagactaaaacaactatccagcaatcccactactgggtatatatccaaaggaaatgaaatcagtatgtcaaagacctatccgcactcccatgttcattgcagcattattcatgatagttcagatatagaatcaacttaggtgttcatagtggatgaatagataaagaaaatgtgaaatatatatatatatatatatacaatggaatactcatcagccattagaaagaatgaaatcctgtcattcgtgacaatatggatgaatctggaggtcattatgtttagttaaataagccaggcacagaaagacaaatactgcatgatctcattcatgtggaatgtaaaaaagctgatcttatagaagcagagagtataacagtgattaccagagatgggtagggcagtagtaaggaggagagattgaggagaggttggtcaatgggtacgaagttacaattagataggaagaataagttctggtgttttattgaacagtagagtgtagttaagaataatgtatatttcaaaatattatagaatagaggattttgagtgttctaacttcaaagaaatgataaatgtttgaggtaatggatatactaattaccctgatttgatcattacacagtgtatatatgtattgaaacatcagactgtagcccataaataggtacgtgtcaattaaaataataaaaatagtaaaatgtatagttacttccacggggtagaaaatgtggtatatattcatggtatactacacagccttaaaaaaagaaaatcctgtcatttatgacaggaaaaaaaaataagataatccaatgtaccatttgttgaaaatactttttctttttattgcattatcttgacatctttgtaaaaagtcggttgaccataaatgtgtgggcttaattctggactctatttcactcctttgatctatatgtttatcctttcactaaaagtagactgtcttgatattgtagctttataaatttgaaaatcagctgtgaaatcctccaaccttgttctacttgtaaacattgttttggctattataggtcatttaaattttcatataaattttagaatcaacttttcaatttctacaaagaattccgctgggatttatattgggaatgtttttaacatttagatcaatttagggaagatttggtatcttaacaatattgagtcatcagatcgtatgaacatatatacctccatttacttgggtctttaaaaaattgtctcagcatgttctgtagttttaagtattgaggtttcaaaagttttttgtaatacctattcttatgtattttatggtttaaaaaattctattgtaaatggattttaaacagacttttaatttgcagagactatttcttcctttccaatattaatatttgtttatttattttgtcattataatggctaggacttccaggacaatataaacagaagtggtgagagcagacattcttgccttaaccctgatcttatgagaaaagtgttccatattttacaattaagtatgtgctactcataggtttttcccaaatactttattaaatttaggaagtaccctttctggtttgctcagagttttatcatgattcattgttgaatttcatcaattttcttttaatctattgatatgagcatatgatttttcttcgttttactaatatgttggattacactaattgatttttgaatgttggaaaaaaccttccattcctagggtaaatcccacttagtcatgatatattatcttttcaaacattgttagatttaacttgtattttagtaaatatttttacatctgtgttcatgtagaatatctgtaaataattttgtaaagaatatcttttcttcttgaggggtaatgttttcattaggttttagtatttctaacctaataaaatgacttaggaggtgttccttcctctattttctgaaaggttgtgtaatattggtgttatttcttccttcagtgaaacattctgtgccagggattttcttttagggaaagtttctgataataaattcaatttctttcatagactttctattaaaaatgttaacactatttatattttatttcatgctctgtcaattttgttaagttgtattttttaaaggatttgtcagtttcattcaatttatcatatttttggcacaaagttgttaataatattctctcatcttttaacgtctgtataatctgtagtgataacatctttttcatttttgatattggtgatttgtgttctatcctcttttttatcaataagtctagctgagaatttatcaattttgctgatttttttcgaatagccagcttttggctttgttgatatattttctattgtttggtttctatttcattaatttctgcttttgtctgtattatttgccttcttatattacttcgggtttactttgctctcttttagattttaagtggattcttaggtaactgattaggtaactgacatttcttctaatataaaaaaattaaagccacgaatttattagtatgaactgctttatttgcattttactaatttttatatgtgatgtttttatttttattcatttaaaagtatgttctaatttccattatgatttaactctttcacccatttattacttaggagtgtgatcaagtttacaaatatttttggttttcctagctatcttgttgcttttgatttctaatctaattctcttttggtcagagaacatactctgcatgatttcagtcttttaaaaatctgtttagacttgttctgtggcccagcaacagtctatcttgatgaacatatcacgtgcacttgaaaagaatgtatattctgtaattgttgggtgtaatgatttataaatataaattattgttatccagattttctgtgtctttatttttttgtctagttgtcctatcaattgctcagagagcagtgttaaaaatcacctatcatcattgtgtttatctctttgtgcccatttttgcttcatgtaatttgaagccctgttattaggcacacacattgatgattattataatttcctgatttattgatccttttatcttcataaaatatcgatttgttgctggtcatactttttttcttgtagtagcttttgtgtgatattaatgtggccattctagtctcatgttttctgttttcatggcatattgctttttgttcattttacttttgtttctttaaagtatgcccttgttgaagcgtattgttggatcttgctgttttacccattttgataatatctgctttttaactgaagtgcttagcccattcacattagtgtaatatttgatatgtttagatttgtgtccttcaatacattatttgctttctatttgtcccctctgattttgttcttctgtttccgcttatctgttgtcttttgaattatttgggtattcctcagaatctcttttaatttttagatataactatttttagattttttttaatttgcattttttagtggttgctgtaaggattacagcatacatacttaacttttctcagtccacttaatagtgtacaaccttcataaaatatagaaaagttacaaccatataagactatttagctcttcctgtgccattgcttatgctatagttttcatttgtattaaatctcatacaatacaaaacccacaagacacagttataatttttgtttaagcagttattatgtactttagagaattaagaaggaaaaaaatagtcatttctgtttacctagtcatttaccatttctagtgccattaatttgttcctaaagagctgagtttatccataatgtctttttgcttcaacctgaaaaactttacttagcagtttttgtaatgcatatatgctgcagtgatttatcttagttttcctttatctgaagatctatttatcttccatttgaatgatatagaattctgggggattgacagattttattttcttccacttaaaaaaaatgttattctactgtcttctaatgctcatagtttctgatgagaagtgtgtagtcatttaagtcattattccctgtgtgcgatatgattgtttttgttgctcttgcatggctggggggacacttattttaaggttttctacttacctttggtttagaagtttgactatgatgtgcttatttatgcttttctttatttttatcctgtttatggttggctgagtttatcaaacatgtacatgtatattgttaaccaaatttgacaaatttttgttccttatatccttaaattttttaatcctaatttctctctatcctttctggactccaattacatacatatggtactttttaaatattgtctggttttaccatagtagggttaaagtttggtcctttaagactatacatttctttcatattcttgtatattctatattgttcaataggtctctgagatttattttatttttattttatttcagttctttttcttttcttcagattggatcatttctattgatctattttcagattcattgacttttgcctcttttagctccatttttcccaagatcaggcagtgagttttaatttcaaatattatatttttattgctaaaatttccattggctttcttatattttcctttttttctgataagatttcctttattttcattccttaccaataagttttcctttatcttattgaatatagttatagtagctactttaaagtcattgtccgctaattcccacatctgtgtcatctcaggtttggattcttgatggtctttacctttaggaatgcatcacatttttctggtattctatgttaggtaattttggattatatcttgatattattaatgtgttattcttgagattcatcattctgtttgtgttagtccattattgcactgttataaagaaacacccaagactcggtaatttataaagaaaagaggtttaattggctcacagttccacaggctgtaggaagcatgatgccggccatctgcttggcttctggggagccttcaagaatcatggtggaaggcaaaaggaaagcggctcatcttacatggccggtgcaggagcaagggacggggggaagtgctacgcacttttaaacaaccagatttcacgagatctctctcactgttatgagaatagcaccaagggggaaacctgccccatgatctaatcacctcccaccagggcctgcctacaaaattggggattacaatgtgacatgagctttgggcggggacacagatccaaaccatgtcattctgccactgccctcaccctccgcgaaatctcatgacgttcttacattgcaaaatacaattatcccttcccaatggtccctcaaagtctgaactcattccagcattaagccaaaagtccaaagtccaaagtctcatctgagacaaggcaactctcttctgcctatgagcctgtaaaataaaaaacaagttagttactcccaagatacagtgcgggtacaggcattgggtaaatactcctgttccaaaagggaaaaaccagccaaaagaaagaattataggccccatgcaagtccgaaatccagtagggcagttattaaatcttaaagctccaaataatcttcattgactccatgtctcacatccagggcacactcgtgtgagggatgggctcccaaggccttgggaagctccactcctgtggctttgtggggttcagttcctgcagctgctctcatgggttggtgttgaatgcctgcagcttttccaggcacagtgtgcaagctgcttagaactgctggtggattcccattctggggtcttgagggtggtggccctcttctcacagccatttcactccagcctgggcaacaagagtgaaactccatctcaaaaaaaaaaaaaaaagaaagaaagaaatttcctctgccaggtaccctaaactcatcattctcaaatttaatgttccgcagattcctacagcacaggcataatacagccaggctctttgctaaagcataaggaaagtgacatttgctccagtcctcagtaagttcctcatctccatctgagacctcctcagactggacttctttgtccatttcactatcagcacttcggtcccaatcattcaagtagtctctaggaagttctaagctctccctcatcttccctccacactattccaacctgtgcctggttacccagttccaaagtcactttcacattttcaggatctttatagcaatatcccactctcagtatcaattttctgtactagtcttttctcacactgctataaaaacacctgagactggataatttagaaagaaaagaggtttaactggctcgcagttctgcaggctgtacaggaagcatgatgctggccatctgcttgtcttctggggaggcctcaggaaacttacaatcatggtggaaggcaaaggggaatcaagctcatcttacatggcatgagcaggagcaggagcaagagagagagaagggggaagtgatacacacttttaaacaacaagatctcatgagaactctctcactattatgagaacaacattaagggggaaatccacccccatgatccaatcacctctcacaggccccatctccaacattggggattacaatttgacatgagatttgggcagggacacagatctaaaccgtatcactgttatatttctatgaagggtgttgacatttttgttttagtagagaataaacttgattagactaaaaatgcaaaatctttcttgcttctgcttggtagcagttcaaacttcagtttagttcttttagctttagcctttgctctttatatgtgattcagggacggcagagatgtgggaagaatttgatcatagaatttagggctcaccttcttttgttctgtgcactcaaggattctctacccctctcagttgtggattacagtgctgttgctcctggctcctcccctttgtccttaagctggagaaactagggattatctgtcagagttttaacttcctcatgctgtgtcacaaccttgatcagctattaggccaaagcaacaaaaacgggaaactcacttcatgctgattcttttctccaagttttagtgccctcctctcccaaaactgcctccttttgtttattccccagagtccttagatatttgctttatgtattttggccaggagctatagttgttatctctggaagggtctgtttattatgagcttactttgatctactagactgagcttcagacattgtgttttgaaatttttgcttaacattacatttatccaagaattaaatttaatatttatttatttttttcttcaacttttaagttctgaggtgcatgtgctagttgtgcaggtttgttacccaggtaaacatgtgccatggtggtttgctgcacagatcaacccatcacctaggtattaagcccagcatccattaggtattcttcctgatgctctccctcccattgctcccccaacaggccccagtgtgtgttgttccccttcatattttcatgtgtactcatcattcagctcccacacatagtgggacgatgtggtatttggttttctgttcctgcattattatgctgaggataatggcttccagctccatccatgtccctgcaaaggacaagatcttgttcctttttatggatgcatagtattccatggtgtatatgtaccacattttctttatccagtctatcattgatgggcatttgggttgatcccatgtttttgctattgtgaatagtgctgcaatgaacatacacatgcaggtatctttataataggatgatttatattcctttgggtacatacccagtaatgggattgctgcgtcaaatggtatttctgcctctagatctttgaggaatcgccacacagtctcccacaatgagtgaactaatttacaaccccaccaacagggtaaaggtgttcctttttctccatctgttgtttctggacttgttaataattgccattctgactggtgtgagaagatatttcattgtggttttgatttgcatttacctaatgatcagtgatgttgaggtttttttcatatgtttgttggctgcatgactgtcttcttttcagaagtgtctgttcatgttctttgcccactttttaatgggcttgtttgggtttttcttgtaaatttgtttaagttccttgtagactctggatattagacttttgtcagatggatagactacaaaatttttctcccattctgtaggttgtcttttcactctgatgatagtttcttttgctgtgcagaagctctttaatttaattagatctcatttgtcaatttttgcttttgttgaaattgctttaggcacttttgtcatgaaatctttgcctgtgcctatgtcctgaatggtattgcctagcttttcttctagggtttttatagtttcatacttttatgaattacgtctttaattaatcttgagttaatttttgtataagatgtaaggaaagggtccagtttcaattttctgcatatggctagccaattctcccagcaccatttattaaatagggaatcttttcctcattgcttgtttttgtcaggtttgttgaagatcagatggttgtaggtgtgtggtgttatttctgagttctctattctgttccactggtctacacgtctgtttttgtaccagtaccgtgctgttttggttactgtagttttgtggtgtatatgaagtcaatcaagtagcatgatgcctccagctttgttcttttgcttaggatcggcttggctataaaggctcttttttggttccatattgatatggtttggctgtgtccccacccaaatctcaccttgaattgtagttcccataatccccacatgttgtgagagggacccagtgggaggtaattgaatcatgggggcaattatcccatacagttctcatgatagtgagtgagttctcattaggtctgatggttttataagggctttttcctttttgcttggcacctctccttcctgccaccatgtgaagaaagacgtgtttgctttcccttccaccatgattctaagtttcttgaggcctccccagccatactgaactgtgagtcaattaaacctctttcttttataaattacccagtctcaggcagttctttatagcagtgtgagaacaaattaatacacatatgaattttaacatagttttttcgaaatctgtgatgaatgtcaatggaagtttaataggaataccattgaatctataaattactttgagcattattgccataacactgattctgtctatccatgagcatggaatgtttttctatttgtttgtgtccactgtgatttccttgagcagtggtttgtcattctccttgaagaggtccttcacttccctttttagctgtattcctaggtgttttattctctttgtagcaattgtgaatgggagttcattcataatatggctgtctacttgcttgttgtttgtgcataggaatgctagcaatttttgcacattgattttgtatcctgagactttgctgaagttgcttatcagcttaagaagcttttgggctgagacaatggggttttccagatataggatcatgtcatctgcaaacaaagataatttgatttcctctcttcctatttgaataccctttatttctttctctttcctaattgccatagccagaacttccaatactatgctgaataggagtggtgaaagagggcatccttgtcttgtgctggttttcaaggggaatgcttccaggttttgcccattcagtgtggtattggctgtgggtttatcatatatatggctcttattattttgagatatgttccttcaatacctagtttattgagcatttttaacatgaagggatgttgaattttatcgaaggccttttctgaatccattgagataatcatgtgggttttgtctttagttctgcttatgtgatgaattacatttattgatttgcatatgttgaaccagtcttgcatcccagggatgaagcctacttgatcatggtgaataagctttttgatgtgctgctggatttggtttgccagtatcttattgaggatttttgcattgatgcttatcagggatatcagctggaagttttcctttttgttgcatctctgccaggttttggtatcaggatgatgctggccttaaaggagttagggaggagtacctccttttccattgtttggaatagcttcagaagaattggtaccagctcctctttgtacctctgatagaattcagctgtaaatctgtctggtcctgggctttgtttgcttggtgggctatttattattgcttcaatttgtaatttaatatttttaaatcttgggttaaatggttgaatgaatgtgtgaaaagttagatatcaatgaatgaatattcttaaatgtataaactttaatcttgctggatataggataaaatttacattaaaacactgtaattaatcagtcaatttaagtaaaataaattcaaggaagtggtctgaatttctcagtgagcatttagatatttatgggagtcatataaaataaattataaatgtgactgagggctttttattaaggaaaatgaaatattgctatggacatgattctgtgtgtttctttactacactatgaactaaaaattttggagacaaatctaagtatataaattggtttattgatgaccgattgggaatataaataggcacaaaaatttggcgaagcattttggcatgtctacctaaaatttaaatatgtaagcactagtccccccttacctgcagtttcactctgagcagtttcagaaaataggtgagcacagtacagtaagatattttgagagagagaccacattcataaaacttttattatagtgtattgttataattgtcctaatttattattattgttgttaatcttttactgtgcctaatttataaatcacactttatcataggtatgtatgtataggaaaaaacatagtatatgtagaattcagtattatccttggtttcagacattcagtggggatcttagaaagtattctctgtggaaaaggagggactactgtacttttaacaaagcacttcccagaataaacacacagacatatacatgcacacactttcagaaatgcacttaaatattcaatcatggagtaaaaattaattatgaaatatctagacaatgaacattatgtagtttttattaagaaagaagcagaattatatatactgacatgaaaggatgttcattatatatgttaagtaaaaactaagttcatcatatatgttaagtaaaaaaaagtcacaaattaagagaaagtgttaattgatttgagagtttgtgtattttttttcctattttgtgctgaaaagctgaagttggcatcaaccaaggcatattgttatctatgtatcaagctaaataatttaaagatctttaagactattaattcagagatgctgtataaatagaatcagtgccagattttttgtttcaattctatcagccaagtatactatgctttctttgcttgtgatagaaaaaagagagaaaaaacacagaagcaaaaagtaaagttgtacaatagtgtgtagagtgtggttccattttgtaaaatgtatcagtgtgtatatttatatagcatagtcaaaagcctggagtgatataaattttctgttactggtctagtatacaagggaattagattttaaaggactttcattgtttttaacaattctgaacaaatttaatttggtacaagaagtatatattttaaatattattgaacttaattaaaataaattagagctcaaaaaataaataaatcacaggaagttcacagtctgactttatcaggaatgttgctattttcttaacaggtcatcaaacattatcactgatgcttggaaagaagcactttttataatttaaaaataccttttattcttcaacttctgctggcttaaagagcactaagtccacatatcctaggaggcatggctgtccaatatatactatgtgtacattgatttatgaaccaataaatgtttcatacacagttgagattttaaatgagcttatgataattggatcaaaggaatactagtccagcttgagagtactgcagaaaaccaatcacagaaagctatgatgaaattttaattataaaggatattgaatatcctagagtgacaactctgttataataaatgtaacactgaatgggaaagagagaaaggagatttttacccatttctgtttgaaatcaactttctatttctagtaaattatcacaccattctgttttaatttttatatcttaaagttatcattccagtgtctttggtttactgggtttataaaagaattgaccagtagctatataatagatacagaaaagtctgcctgggtgtggtggctcatacttgtaataatattatattattataattgttctattttattattagttattgttgctaatcttttactgtacctaatttatacattaagctttatcatgggtatgtatgtataggaaaaaatgcagtatatatagaattcagtattatccttggtttcggacattcagcaggggtccgaaggtgggcgaggtgagcccactttgggaggccaaagtgggcagattgcttgaccccaggagttcaggaccagtctgggcaacatggtgaaatgctgtccttacaaaaaatacaaaaattatctgggcatgatagtgcatgactgtagtcccagctacccaggagcctgaggtgggagcatcactgagcccggtggttgaagctgcaataagttttgattatgctactgcactccagcgggacaactgagtgagaccctgtctcaaaaaaaaaagtcacaaattaagataaagtgttgattgatctgagaatttgtgtatttttttctattttgtgctgaaaagctgaagttggcatcaatcaaggcatattgttatatatggatcaaactaaaaaattttaagatctttaagaccattaattcagagatgctgtataaatagaatcagtactagattttttgtttcaattctatcagccaagtataacatgcttttcttgcttgtgatagaaaaaaagagagaaaaaacacagaagcaaaattgaagaatttgtaaatcatttctaaataatttcaataaaatgagctttgaaagggaaaatttttagataacattatctcatcaaaatgccttaaagtatattttaatattcagtaagaacagtgtatattaacatggctaatttagaggatttatattttacccacatgataatgtattatgcctgtaactgctaaaggaattatgtagcaaaatctgtcaaggaatacacgagtgggatttatatcagaaaaatcaaagccatttgtaaagccccattacttaggcagaatatcataggtaggaggtagatgttactgaaagaagaagttgggatatgaaatacaaatctattttgcatcatgattttgttaagtccggctgtttattattaaaaacatgtacagaagattcaattgaagtttctaaaagagaaagaaacttgtagttgtgggaacaatagtattccttatgaaatacttagatattaatagcttgagactgataatacaattcttaagttaggggttgcatgtgtagtggtcagatgttatttcaggatctcaagaaacagagccatggtaaaaagaagcttcctggagcttctgataaattccgtcacctttttgggacccagtttcttcatcaataccaacctcattagggtcctgtgagaagtacatgaggtgagatatgtactgaaataatatgccaactcttaagtgccaagacattaggatgcaagggggggtgcccaaaaagtcaacaattacttgatactctagatatatgtatggataattttgagaagtaatccttcttacacagaggtgtaggtttgtttgttccaagcagcaaacataatgggtataggaaagagaaactgtggccttcatatagactgagcttaggaaaacagttggaaaacagttcaaattcaaggtacttcaacaatatctagtgtgtttttgaaatatatttttaaaacccctatccaaatcaatgaatgctttggctaaaacctacttgggaatgagggtgttctttagtgccaaatactcatcttattttagtccatgattttagtccatggctaaaatcccaagagttacagaggagaaatagggccaaacaaggtttctattaaaataagaggtcccaagtgatgaatggaaacttggaacaggtttaatggcaactataagccagaaattagctgaaatacacactaatgaatttggggcatatcttgagtttcagatagaaaattggtactaagtttagtgaattagaaacatagcttaacctaggcagttgcaattcttgttccaaaaatgctcaatttgctgctggactgcatggacacttgctacctccttgttttgagtcattaacaaaatgttgaatgggatatctggagtatcaagtaattgttgactttttggtcacccaacccccttgcatcttaatgtcttggcacttaagagttggcatattatttcagtacatatctaaccttatgtactcctcacaggaccctagtgaggttggtattgatgaagaaactgggtcccaaaaaggtgatggaatttatccgaagctccaggaagcttctttttaccatggctctgtttcttgaggttaaagaacatgatttaccaggctctgtttcttgagagaccaagagtggatccctgtagtccccattagaattctccttctagtttgaactattccattagtaaacactttttggcatgttatttaaacaattacaaaatcacctaactacactgtcttgcagctgcctttctttttttgtcttgtccacgtgagtatattgggagactttgtttaatgtctccacaaattctagatagactgttcctgcagcatttctttttttaaattttgttttgataagcatttattttggcaatgattctagtaaatgaaactaaagtgcccatatgaaaaacaatcttaagtctatgtggttagtttgaagttaccagtttttaattaagccggagtagtccttagtatgaatgccttcatttctaagtgctcataaacaatcactttagtaatattacagttttgaaggaatttatatcaagcttaatggcactttttaaaagataggaaattgggttctctagtcacatctgtaagttatttcagtgccttggaagatcatttatctggccacagataattgacttacttacatcagttttttttttttttgagatggagtctcgctctgttgcccaggctggagtgcagtggcatgatctcggctcactgcaacctccgcctcctgggttcacgccattgtcctgcctcagcttcccgagtagctgggactacaggcacccaccaccatgcctggctaatttttttgtattttttagtagagacggggtttcaccatgttagccaggatggtctcgatctcctaaccttggcctcggcctcccaaagtgctgggattacaggcgtgagccaccacacccggccacttatatcacttttatgcttcctatctccttattgatcttgaggttcaagtttcacttaaccattttcttcaatgaaaaataattttataatttaaaaaacctcaacctttaatattctatgattcttgttaggccatctcaattgagaatactgataaagaagtaaaactccccccaatactggctagtttgattttatctgttaatattacgcaatctgccccaaacctgtctctccctttttattgttacttatccaaagatggcttgaatctcttatggcttgaatctctttgtttattctaagcaattttcagacacctcagccaactatcaataatatattagttttttagaactaaaaatgtagaggatctccccctaaaagccaattgttaatgccaaatatttgactgatatatttcttctggaggaagggagatgtgaaaaaatttagccatcaagttatgtgaaaactttttcatcttcccatccactggatgttttatctgtaaataatgctataatcatattggaaagtattttccttctggggatgcatgaagatcaggaatcctattcgtttttaacaagatggaatttttaaaaactactttggacaactctaaacatcagagatgaccatttgtctcttttttattatataacttgtgctcggtttgtagagcaacataaatacatgaattaaaaaatgaaaactagctccttccctatttgacagatacttctcaacctcctctccataagatatgctctatccctatataggaaatttttctgtagcagcttgagtttactaaaaataagatctgaagaaaatgaagcaattaacatttattgagagtctataagggtttctacattgtgaaggagacagaaatataagacatggctcctgctttcaggttgcttataattaaagagataatattaaattatttggatgaatttaaaaatgacacatgccatcttacagatatgctgtagactgtgaaaatgaaaaaaaaaacctcgtgtttagagtagacactgtttgatggattaggtaggttttcatctggactttgaaatgtatgtaagattttataaggaggagagaaaataagaagctgtttgtattagaattacacagataaatttgtaaatttagttcttttcaaagaacattaattgagcacctctgtgccaagctccctactggatgctgtagattacagcatgtttaggaactaacttcatactctgttgctaaagtatttctgtgttttctaaaaaggtaaatctcttgtgaggaaacaaatctcttgaaggggttctcataacagaagtcccatttacttcatgatataaaaaggggctgttttctggttttgttctcaaaatgtaggatatagttctagacgtaattgggaaagcttaactttgttgcatacgcatcttccctatcatggttgatttcctatatggcatagttaaatgtgtttatccgtgtttgatatctaaagggccatgctacatatagactgccaactaaggttttatctgatgataataaattgttgtatttcatgacgacagcaacaacaacaataatgtacttaactagtcactgtgcaaattgctttacatacattttctcatgtaatcataataataaccgtatgagttttgcttactattgttttccttaattaaaatgagtaaagtgaagcttaggctaagtaacatgtccatagccaaacagttagtcactggcaggagtgtgactgactccaaagtctatattcctaattactgtgttctactttttaatagagagctcttgaaggtccaaggaaaggaatgcataatggtgtggtcaaggcattagtgttaatatttgtagaaagggtaattaacaacagtctgagcaatcacattctaacaactagtaaggttggcaggagcctcagtataatggtgtgaggaacgaaatcattatagtgccaaatagagtataccatctctttagtacaatgtctttcaaaatgaggctgattgtgttggctttatatttgactccttaataattaaggcagtaaattctagctggagctaaatacctacaaggcctaaaacagcataatggacaacctggcaggtgtccttgctggaagatgacaagagtgctgaaaggagagtcctggtttttctcccaagacatgacatttgggggcttccattaaaaaattaccaagcctctgccactgtaatctcttccttaagtgcctatgattttttcacagtcacaggtctatgcctggtcaatacccagtggccaggtctctgagctgcgtgcagagatggcagcgacttggagggctgggaggagataaggggaggaaagatcacttttcatgacaacttacaacttgattccacttataagccatttattttcagaaacaagtaatgggtgaggacacaggccaggtccacaatttgtgcacttgagagattaaggcctccgagatcaaattaccacagcaaactgagacagaattattgtagggatgtttggggaggatgcagagagaagaggaagaagccagagacccaagaaaggagacaggaatagattttgatgaaaattgcttcctactctgtacccttgaggaaacaaagaggacaaataagaagcagcagtgataggaggctgggcgcttctctggaataacactggctaggtagtggagcattgatagtgagtgtgcttggttggtggaacgaagggatgtgctagttcaggcctttgaattctgggtgtcaggatcacaaccttggctcctttaactgtccgctctaggagggaagcatgccaaatgtcaggtctcactctgactttgttccagtccatagctagaaaatgacccatagaggaagatctacagatgacagaatactgggagatgaagagaaaggacgttttagtgagtgctttttttgcacatgaggcaatagatttcaaattcctgtggaagaaatgtgagaacctgggaagagtgaatattcagaactgagcagcagaggcaatgacacagcatggaaagatttcctctgatccttctaccttctcttttactgaagtgaatttgttgtctctgtgttgcctctatagcagtacaagaggaaacttggggacacagaagaacagaagtctaaggagtcttatatttaaggaagataagctgcagtcattgaaattgctggttattgtaagataaatcccagactcccacattttgcttaatgacagcagatttttttttttttttaactgcaaagcattaatggaatccaaattccagcctggcttaggagatcaacagtaacgctcttgatttaatggttttgcagactcttgaagacattgtcatccattaaagaaaaaattttaaattactcttgaaagaaaatgtcttgggtgataaatgtaaaagatttgaagcaagattagaaaaagcttgagagaagaatctctttaaaaattttaccagattttccccattgtcgccaaaatgggtcaaataatagatttgcctacagcttcatggagactatttttttaaacagagcattttaaacatttaaatattggttatttgccaaggcacacactgaaaataagggccacttggccgagagcagaattgagtcttggatcccaggatgctggttttaggcttgctcccggaaagagggcagcatttgccatccccctccttttgccctaggagttgagcactttctgcagtacttaagagtgtccagggaagatgtgggagtcaggtgaatagttcccatcgccagtaaccccagagcgcctccccctgcgttgtttccttttaatgttagatccgccgcctgggtgcccatacttagctaaggcccctcagtttattttcctgaattgcgcttggagatcttttcctggggagctgatagccagacttctaggggcttgactgcttttcccagactaatctccttaaagacccgttaagcaggggagagacggtggagactggatgaactggacagtgggggtagggagaaagggagtggccgtgttcctgcggtccgctgggatccggcaggtccagggtgaaggagatggggctggagaggctgagcagtccgggttcgctgtccgccacttcggcgcggaatcagagcaggacttgctgagccctcctaccgctccctttccccctccccctctgtcttcccttctgtttccttttccctccccctggagctgtagcggcagcagcagcaggaagccgagccgggttgagcgactcggaggcgagcggaggagctggaatatggggagtcagcgaggacggtggggccaggagcccttgggagggcctacggagggagcggccccaggcgctttctagagcgtgagcggtgggggagcaggcgcagggtggcacgagcggaggcggggcccgggcgtggggcacggctggggaagctgccgcctccggccctgcccggctgcctccgccgcggccagtggctatggagcaggcgggcaccagacctgcggcgacagagcatccacggctccggcggcccatgccctggctgctgctactgcctctcctgctgctgttgctgctgctgctacctggccctgcggcctcccagctgcgatactctgtgccagaggagcaggcacccggcgcgctcgtgggcaacgtggctcgcgcgctggggcttgagctgcggcgcttggggccgggttgcttgcgcatcaaccatctgggtgcgcccagtccgcgctacctggagctggacctgacgagtggagcgctcttcgtcaacgagcgcattgatcgggaggcgctgtgtgagcagcggcctcgctgcctgctcagcttggaagtgctggcgcacaaccccgtggcggtgagcgccgttgaggtggaaatattggacatcaacgacaactcaccgcgtttcccgcggcccaactaccagcttcaggtaagcgaatcggtggcgcctggagcgcgctttcacatagagagtgcgcaggaccccgacgtgggcgccaactcagtacagacctacgagctcagccccagcgagcacttcgagctggaccttaagcccctgcaggagaacagtaaagtgcttgagctggtgctgcgtaagggcctagaccgggagcaggcagccttgcaccacctggttctcacagccgtggatgggggcatcccagcccgctcgggtacggcacagatctctgtgcgtgtcctggacactaacgacaactctcctgcctttgaccagtccacttatcgcgtccagctacgggaggactcacccccaggcacattggtggtgaagctgaatgcctcagacccggatgagggctccaatggtgagctcaggtactccttgagcagctacacgtcggaccgggagaggcagctcttcagcatagatgccagtaccggggaagtgcgagtaattggggggctggattatgaggaagcctcctcctaccagatctatgtgcaggcgactgaccggggtccagtgcccatggcaggtcactgcaaggtgctggtggacatcgtggacgtgaatgacaatgccccagaggtggtgctcacggacctgtatagcccagtgcctgagaatgctacacccaacaccattgtggccgttctcagtgtcaatgaccaagactcaggccccaaccggaaagtgagcctgggtctggaggccacactgcctttccgactgaatggctttggaaactcctatacactggtggtgagcggcccactggaccgagagcgggtggctgtctacaacatcacggtgacagccacagatgggggaataccgcagctcacatccctgcgtacactgaaggttgagatctctgacatcaatgacaatccaccaagcttcctggaggactcctattccatctacatacaggagaacaatttgccaggtgtgttgctctgtactgtgcaagccacagacccagatgaaaaggagaatgcagaggtgacctactcccttctggagagggagattcaagggctgccagtcacctcctatgtctccattaacagtgccagtggcagcctttatgctgtcaactcctttgactatgagaagtttcgggagttctttgtgactgtggaggctcaggacaaggggagcccaccactgagcagcactgtgactgccaacgtatatgtggtggacatgaatgaccatgcccctcacattctgtaccctacctcaaccaactcgtcagcagccttcgagatggtgcctcgaactgcccctgctggctacctggtcaccaaagtcatagctatggactcagactctgggcaaaatgcttggcttttttaccatctagcccagacttctgacctggacctctttaaggtagagctgcacacaggagaaattaggactaccaggaagatgggagatgagagtggtagcactttcaacctgaccgtggtggtccgagataatggagagccatcactatcagcctctgtggccattacagtagctgtggtggatagggtttccaaaatcctccctgacactcagaggcatgttaagagccctcggacatactctgaaattaccctttatctaataatagcattaagcacagtgtcttttatatttcttttgacaatcatcattttgagcatcatcaagtgctaccgctacactgcgtatggcactgcatgctgtggaggcttctgtggagtaagggaaaggtcccctgcagaactgtacaaacaagccaacaacaatattgatgccaggataccgcatggcctcaaagtgcagcctcacttcattgaagttcgagggaatggctccctcaccaagacctactgctacaaggcctgtctgacagcaggctcagggagtgacactttcatgttttacaatacaggggcccagacaggaccagggccttcgggagcccaagcagcagtgactgacagcaggaatctcacaggccaaagtggtcagaatgctgggaacctgattattctcaaaaatgaggctgtttctcaaaatgaggtgagacagtggtcagggggtcttctacaaactcatgcatttgttacacatcccccaatatcctgtgatttggctttattgagtcattaacagtgacaagagttatctggtaaactgagtatatatagtatccacaatttgatcataatctgctatttcctctctagaaaaatagcactaaagaattgttttatttttcattttcagaggcatgaagccttgtccataaaattgtttgagaagtgaggattagtcttaatatttaatgctaaaacacagatttgtagagaaacaggacaggccttggaatagggattatgttttagggagtaatgttatgagactcaaggagaaatggcctctgctgtatcatctacagggaaatttttcttttgaaatcctatatgagtgatgtttcttaaaaagctctgaggcctctaggggctatcatagtcaccactatctgctgtctctgtttatactctggactgtctacagtggaaattatctagttaatatttctggtacttgcactgaacctatgtgataggatcctctggaaatgcatgtcacaagtgataaagctgtagtatttagacatcatactgaagctaaagtttgctttggctgtatgatgtggcaactcttctgtagagggctgtcagagggagtggatgatggtgaggcagagagattaagtaccaatttgtctggttggtccagggaggtattagaatgagtggattaggggtgtggggggatggtgaagaccaagagaagctgggattagaaggaagagaagggaaaaagaattctcccaatagtcacctttcttggcatactctgaattcattgtaagaggatttccctgaatttagcttaaatgcagcctgtaatcttctgattttctgttgacagtttctatggttttgatgagatgtaaagtagccttttcaagtccttcatgtctttaagttaaatgacagtacttccaaagcatgcattcattttctggatctaaaatttgatttgctatagcttcaaaaggctggcttggaaagtggatggcttaccctacagtaaggtgtagaggcaggtgttagtatatgcactagttttgagatttaagtaggtataaggccagcttgttcattattatgaagaatgtacataaattattagaaagtagatgaatatgtgtgtgtgtttgtgttgtgtgttcgtctccatatgtatgcttgaaataacagagatatgctttgtgatacttaaaacttggatttcaaaagccaaaattttgtaccataaatagtgatgaattgttatctttccaaataactactttgtagaaagggcttttagagctactacacaatgtgtgaacaatatttgtctctcctctattttttgcaatatattttcattgacatattgctgtacatacatattgtatgtaatatccatattgttacatttcaagttcatggtaatcttgaggaatgtaatgcacaggcacaaaagttccattcctgattgagagtagatttttctcatggacatttcagatagatttattcatttatcagaagtgcctggtgttagtcaatgctgagaaaccatgggaggcagattgtagattaagaaaaatgggggaataaatcaaagagtttccagaagtctttagatcgtagcatttgaaagcacgtaaaagggtttagctttaaataaggttgctgtagacatttgcttaacaaattcttgtgaagccctttgggattggggtgggctacaggtggtgaagaggcatgaacaagtcaggccaggctcagctttgccaccagctgtaagccggaagctcagaggaaagacactgttaccctccctctcctgactcaaagcttggggcaatttgatacataaactatttctgtcttacactgacctgtatattaatatgtactttggtacacaaacatttaatctagggagaaaattatttcagaaagtgcttgcttttgggagattttgccaggagagtgcatgactttaataaaggcaaatttctgccaggcacttttggaaatccagtgaagaaccccaagatctacagctccagaaatttttgcagttatagggagagagtgtcacattgttacagtgtggcaagataggagcaaaagccactcagttctgaaagtcatcattgccagatcaacctgttaaattcccatgttgggctttctttttttcctacctagttactacagatggcaggagagtcctggggtacaattagtaccatgtgcctacattaaaagtagatgggaattagagaggaagagtaagggaatttgtactcactaaccaccctgctatatagatatatgtatatcatacatatacacatacatatatctcatattactgaatcttgaatattattcaagattattcaatatattgaatattataatattgaatacatatatgatttcattacctgcaagtcatgcgttaaatatttgttaacatctagcatatgaggaaataagctcagggaggttaggtaatctacacagccacactgctagtgttattttaagttgtatccatctgactccaaaaactttttttcaatactatgagtagacagaagttccaatgtttatattcccttttatatgggatattcaggcatttaagctatcactaattcacctagtcgtatatattaactgcttttggaaaaagagtaatttctggcatagaagcaggtaacaaatgggaatatcagtgagttactactatttttttatttttatttttttgagacagagtcttggcctgtcacccaggctggagtataggtgtgaatatggctcactgcagcctcgaccttctgggctcaagcaatcctcacacatcagcctcctgagtagcttggaccatagatgtgcgccaccgtgtctgactagtttttaggtgttttttttttttggaagagatgggggtctcactatgttgcacatgctgttagtatatttgtatttgtttatttgcttcactattggcaaaccctgttaagatcttttatttttattatttcactgatttttctcttgttgcttattaaacatcagcatttaaccccagactctaatctgttggtagattttacccccagtgagcttatttcataaatcacttgtgcagtgaggattctgaagtaactatttggcaatagggcagaatttctctttggaaatttctgaacttgatactgaatgttgttggcactcccttcagagtctccataaaaagaaaccaaattttttttttttttttttttttgagatggagtctcactctgttgccaggctggagtgcagtggcgtaatcccggctcactgcaacctccgcctcccaagttaaagtgattcttctgcctcagcctcctgagtagctgagattacaggcacgcgccaccacgcctggctaatttttgtatttttagtagagatggggtttcatcatgttgtccaggatggtctcgatctcttgaccttgtgatccacccgccttggcctcccaaagtgctgggattacagatgtgagccaccatgcccggcaaaggaaaccaaatcttaaggtagattctgtgcatttgtggtcgtggtgttgtgattgttaatgagtcactttgagtactctagtagatttgtccaacagtgtctcagtgggcccagctggcacaacatgtagaaattatgaaagagtagcagagatgaattaagtttgcattcactttcacttattttaaagcaatttgtagtcaccaaaccttcagttatttctgccactatgtgtgcatattcaccctaattccaggtatagtgacctgaaagagttaattcttctttcagtggcacctacttttatttcccccagcactgatttttctatctgatgactctatcctggaacagagtttacactcgttgtaaagtgacatagtagtgaatttataaaaattgcacaatggtcagaatagacaaagaaatcatatctatgagcttccactccagtttttcatcctctgatggtcactttataatgactggggctgttttagtttgcaaatttcatattggtcacaggactcttcttctgagaaaaagtttattttctttggtctgatgatacaataatttatttcaattacctctttcctcaatttttctacagactgctgagccagatggaattatggctgagctcttctctgtttctgtatcttgtacacattctgactgaagaagaaatctatttattgtagcttgaatgtcattggcctactgtttccttctgacccaggagtgagccatcacatgggcatctggtctaactcagaacactctgcagggacacagcctggcatattataggttgcctattggcatgctgtctacttgacagaatagcaaagtcagttctgggtacttgcttgttgcctaccaatttttgctctcaatgagaggtcagaataatgtcaatttgcaaatgtttgaggaaacattcctgtcaccaaacccagaggtttagctgaatatgatggcattttacaggtgtctttaaatgtggcttttacagaacttcacctggatcaatgttttgtgcatgtgataatacaactataaatttagcttattaatatgataatatttggagcagtataatctataaccatgacttcaaaaatcaaaggttaaaagtattcttttgcagtgttttaaatctgctaacctgaaaactatacaagggtttttctttcaagaattttaacttgacaaatgcaaaggaatatccaacattgcaaaggtaaagagaaatcttagttccttggcatataagcaccatcagttcctttctggccttccagggtcagaactctgggctccaaggaggtacaactgtgagtgagagagtagctgctgtgctagcaggctatgcatccagaactaaacagacctagcactttctgttgtactggaacccattaggtatgttctaaagttatgtttattttactttcctggtttgtaaattagcattttaaatgactacattcagaggaaagtattccacccagaattctcaaatgtattacctttgtgttttattttattttagtttttttgagacggagttttgctcttgttgcccaggctggagtgcaatggcatgatcttggctcactgcaacctctgcctccagggttcaagcgattctcctgcctcaacctcccgagtagctgagattacaggcatgcgccaccatgcctggctaattttgtatttttgggtttcaccatgttgttcaagctgctctcgaactcctgtctccaccttggcctcccaaagtgctgggattacaggtatgagccactgcgcccagccctcattttgatatactagaagaccaatatgcaacataatgattattttaaatgttatattcccttttgccttaatgcggaacagtctatgtatcccttttctgatgatttgtaacaaattaccacaagtaagttgtttaaaacaccacctatttgttatctcacagtcctgtaccatgtggctgagttgtccgctcaggtattctcaaggctgaaatgaacacagctgggctgtgttgtcctttgcaggctcttaggaagaatctactatcgagctcattcagattgttggcagaatccagttgtttggggactgagatctctgttttcctacttactattggcctggggtcactctcagttcctagagaactgaggactcaggactcttgtcccatggtctgctccatcttcatggctggcactggagaatcttccctcacatggaatccctcttatgcttcagatctctctgatttctgtctctgacctctagacccagatttaaagagctcatgtgattatgtcagtcccatccagatgatctccctttcttaaagccaactgtgctacatagcataatgtaatcatgggaataagatccatcacaatcacagtcttggagactattcagggtgtgcacaccaggatatagggatcttggggccatcttggaattctgcctatcagtttatatcaatgttcataaaatagcactatgcaaaatctgcagtggatatattcttaatacagtcctattaggaaggaaaaggagatattatatgcagtctcatgtcccagagggcaatttgttgatgtcttccacatggatttccatggtacgaagatagcatattatttcattgagtagttgtgtgagtttattaataaaatagggtattttaaacttattttactttaaatcttagaagaggtgattcatccttctgtagctcaaatattctatgtcataaatcacagataataccattacaagataaattaaatcttttttataattttaataggaactgaagtgtattcttattcttcagtaatactacatcacccatatggactacctaattgattttttccacatatggagttttgtgaccattattctaccaaaagactaacctttgaagcaataggacatattagagttcttcaccaatagaaagtaagcatagtcctgggaggtaccatctaagtattaaagaactaaataatcacagttatttcaactgtgattgaaattgtgatagtaatatatgtcttactgtgtcagatatatcagtagtcaacttttcaacttgaatttttccaagtttaatcaagttctggatgaaactcatgtacattttactacttttagttttgtattgttttaaatcaatatcctggaaactcagaagtaaaaaagagaaagaagaaaaatatatgtcatttcatgtaaatttatttaaaacacagacttttggcaaggcacagtggctcaagcctgtaatcccagcactttgggaggccgaggagggtggattgcctgaggtcaggtgttcaagaccagcctggccaacatggtgaaaccccatctctactaaaaattcaaaaattagccaggtacggtggcagatgcctgtaatcccagctactagggaggctggggaagaagaattgcttgaatccgggaggcagaggttgcagggagccaagatcgcgccactgcacaccagcctaaatgacagagtaagaccctatctcataaataaataaataaatataaataaaacacagacttttgtgttaaggggacctaaacatgactgtcagctgaactcagcaatcagacaagtaatttaatctctccaaagttcagatgtctcatttttgcaatttaagtacaataatgttgactttgcattatagttcatttatttaaacacattttaaaaacctcccagatgccagaagcctgctagactctgactatatagctacgcttttatgaatatctgaagatatgcatgtgtctaatgagcaaaacagatataatccctttcatagagtttactgtctgacaaagaaagaattaggatacatgcaacagtatgtaataaagtgcaaaatctagtactgtgtagctacttaaaacatattatatgctttcttcctttccttttccctgcctgatcttactgccataagaaatcttgtaactgtgattctgtcaaatgaatctaagaaggatgttgttgctgatggactagtatagaaaatagcagcatgacaaattaaatgtgtcattggggaagtgagattgtataatgaactgagtttcctggtcagtcctgctggaactgtgcctttcagcaaaatgagtttgatgatttcattccaaagatcaagttgcagcaattttcatcatgaatgttacccaatcatagaaaaattggcaacatttctcagcagatgttacagtctttctcaaaggaaggttctctcagctgacaagctaacgatagtgctcctgatggcgaggggagagacggtgatgatgactgattgataaaaagtattttagtcatatttccaggtttataaaatgatttgcaaacattttcttttgttccctctaacaccgctagtagataatggaaactcctttgatttggtctgtagataattttatgctatgttatatggaatatccacagcattttgtgaacttgaaaacaaaggaggaagcagcttgcatatgcatatcttgctagcagattggtagaatagagagagcagttagcatgtgaggaccattgaggtaaagtatcccagagttgtaactttttctgggccttgactttggctaattctctgcatgccaaatatcatgtagccatccagaaatctgtctgaatattgagatggtgatcatttctctcctgggtgttatgaagaaatgtgtttattaaatactttgcatcccttaaaggaactatatgaatgataggaataagaattattgacagttttgaatggtctattgatattactatggctttgtttctaccaaatatggtaagtataatgtagaggaaaatacaaaatacaacttttatcccccatttttttcattcaactatacctcaatattcagtgacagggccacctcaatctccgcccatgaaaacgcatctagaggagtgtcacaagtttttcacagtgacatttttgcttactgatacaagacagtgatggtgactgatgatgtcccagtgatttctgagtagcttctaaccagcacataactcccccaacagtctttaagtctttaggtgcccatattttcctctttgttctcccccttcagactgagagtttgtagagagagggcaacagatcttttcaatacacaactaatgcaaaatgtatcaggtttttcttggatttcagctactccctgttaaacaatcagagcttagtgaacagtgattcagtgaggagggaaagcactcaggaaggagcaggaacaagtacaagtttatgaaaaggattagctagcaaaacaaggtcaaactctgcaatagtttgttttcctctccctagtatccctcttcaatcagaaaagagactgttatcagttgctggtgttatgactgggcacatccgccctgggtcaaatatgctgcagtctgcaaagccagcagcagattgcagtcctctgcagtccagccaggccagcagaacttgtgtagccatgtgccctgttatagctgtaatactgaattgggaatgttcccttaatggggcacttgagggcaaaagcagtgaaagcttttcctttctcaaagcagactgttcttcccgtagtgttttaagaacacagacatgtattgggcaaggcaaagccaaaggtggcctttacaagattattaaatctggtcttccagggtatctaatctgtgtgaggaccctgatgaactaattttcttctaaagtgctatatatgtagatatcatcatagagttacacatgaaatggctcattcaatacttttttagatgcctggaaatatttaagggagtaactaatcaattagcagcattcctgggagaacattgtcttgtcattttaacagaaaactctctttgtgattttgcagccacgacagcccaaccctgactggcgttactctgcctccctgagagcaggcatgcacaggtatgtatttccctcctcattcactcagaagtaaccttaacttggtatggctcagataaactgcatctccataggccagaagcagctgtcaaaactaaaaagctttaggtactttgccaggaaaatgcaattattttgtccccatgtttattccttgaaagatcgcaaatggtcagtgccagatgcttatcaagtgctggcatataagagtcctctgtaaaatcacagaaacaggctgctatgtattttctcccatcaaaatttctacagggaagtaatttcaacctccttcatccctctctacctatgctttcttttcctcctttaaaaactgtaattaatactcatgctttgagacttgggtacattgtgcaatgtatacatacatgttgtctaccttgttttttttttaatctcacattggctattacatcctattaccctcaataattgattgctattgttgtttgtgttcacacctattagagcctcctcatctttcccatctgttgctatcttattgtcatcaatgacatggttcttcagaagatgagccatgtaaagggctccaaatctagcttactttaaattaacctagagtaacggtattagtctaagactcagattaaatataattttgctttctctactttgtctctctgacagtaattgattaactaccattatttctggaggtgatccagtatccatgccatggggccaaataaaagattcattatttgcgaatgtctttggaaaccaaatgggaaggaccaagaaacaaatgatcacaactatcaaaaggatttaattttaaagaagaaataatcttcaaacttaagcccctcaaaatatctgggcaactatcaagtgaatattcaccaaacttagatcagttcgtaaagagaaagcctacaaagtatgtgtagagttaatgtgaaattagttttagcccattaaaatgcattagattgaaataaattaacatactctcaagcattacaaatgagcagaaatcattacattgggtgctatttctgattcagaagcaatcagtgaagggctgaagattagtagttggcttggtaagatgtcacattggaacctgggtcataattttaggccagaaacattcatgcatataccagaatattaggtatcagaagaaattctttatatttattagagaccaacttgtgcttttgcctgcatctgagctgttggtggagacatgcaatgggtaaaagcatggtttacagtaccaactcttgaaaagtaccaaagctatgagttgtgccttaaaaactacatttgaaataaaacattaaaacataacttcctggactgggcgcggtggctcacacctgtaatcccagcactttgggaggccgaggtgggcagatcatgaggtcaagagatcgagaccatcctggacaacacggtgaaaccctgtctctactaaaaatacaaaaattagctgggcgtgatggcatgtgcctgtagttccagctactagggaggctgaggcaggagaatcgcttgaacccgggaggcggaagttgcagtgagccaagatcgagccactgcactccagcctggcgacagtgcgagactctgtctcagaagaataaataaatgaataaaataacataacttccttatcccattttcaaattgaaaaaaaaaagccaaatgtgctcctattcgggtttcaattaagatattatgagatttgagtagggtaagaaataaaataaaaattgaaattaaaatgccatttcttttttgcattgtaatacattgaacatattaaatgagttgtgaacctaaataatactaatctttttcgtatgtgtgcttgggtgttctcggtctttccagtcttggacatcatgtaactattctttaaaaaattctgctttgagctgagctggctccaggatagttacaccttcatgaatctgactgagcccacacaatttgctagtaggatccaggaacacttgaaggctgttaatatttggggaaaaaaaacagataattctagagtgtagacaaggggaagaatagtaaaaggtcagagtttaatgagtgaatttctactggatatgttgtttgaagtcaaagagtgagaaaacattgaacttatatgttgccttccctctaatagttcaagtttgcctgctctgttgcctcatataacccctttagtcagtagtctaaattttattttagaaatttaactttcaagataagcaaatgtctagtttaaaagggtcctctagtctaggtgtagtggctcatgcctgtaatcccagcactttgggagggtgaggcaggtggatcacttgaggtcaggagttcaagaccagcctggtcaatatggtgaaaacctgtctctactaaaaatacaaaaatgagccaggcatggtggcgggtgcctgtagtcccagctacttgggaggctgaggcaggagaattgcttgaacctgggaggcagaggttgcagtgagctgagatcgtgccactgtactccagcctgagtgacagagtgaggctttgtctcaaaaataaataaaataaaacaaaatgttcctctaattttgatgagggttttcttggacattttctcttaggatcccacttatttcttccttcctttcttccttcctcccttccatcattcattcattcattcattcattcatccaacaaatatttgagagattaatatgagttagtattagacatacataaatgaatactgcaccatgttctcttttcccttgaacagtttatgttctatctctgcttgcctctaaaggtctcccagtttgtatctcactcccagcaatgttttatgctgaattaatctcttctgagcggggatctgtgagtggtggtgatcaagtttctctagtctcaggaaatatagggtgggtcatctatgcataaaagatatagaaagagtaaaatagaaaataaggttaagaattaattagatagccaaattggaacaatactccaattatcagaaaatattttagtgtgttttcttctttagagtagagaacctaggaacaagagaacctgcaagagaggcttggaacttttgagaacaagccctcctcatctgcttcagtatcgagatgttaaaatggcttagtcctctgatgggcttcctgttagatttagtgagcgccacatggcgttaataaaaaacagaattgccataaagatagaacatgtgtgttcctggaatagtatagcaggcaataagtaagtcagcaatgcttctgcagtttatgcagggtgactgctcagcagtaattgcttcagttcaagcatgagcagaatgtgttagctgcagccctggcttcatagttgtaagcaatttctgagggtggaagaagagatgggaaagaatttatgatctaaccgttatctgggtctgtgtgtttattcagctctgtgcacctagaggaggctggcattctacgggctggtccaggagggcctgatcagcagtggccaacagtatccagtgcaacaccaggtaaagagctggggtctctccattctttcttggtttctggaaagtgatcagatgacctacttttgtaagatcaggaatgttgatggctctttttcttttatatttttgttattcccttttttccatacatacatgatttccttacatatatgattattttgattttatacctaatgctcttcaggagttgaaaaaggataacaaggaaagtgtgtgtgcacgcatgtgtgcatgtgtgtgtgtgtgtatgaagtttttggggtttgtttgtttgtttaaatcaggtacctttcaaatgcttaggtcatccaagccatgcagagaagatctggtggccttatgcacagagatgacactgttaacaaagatcttttggttgaagactatggaaacccacccaaagtagtaaggaaagaaagagaaaaagaaggaaagaaagaaaaaggaaggaaggaaggaagatggtttctcatggaagtggaaaattatcggaaccaaggcattgttttgagttcaagtcaaagtcaatctgcttctctctgcacatcaacaacattctgcagactgacttttagtgccttggcatgcatgttgccaaacatgaccgcctcacaatttcttagtttagagggataatagggactatttcctaatccaaactttcaggaaagagaacctgctaagttgtgtaaaaaacctaatggctgggtgagtataggaaaattgcttaaactcacatttgcttggtatccttattcttgccctatcactaaagcagggtcatgtaatagaaatatggctttggaggcccatcgctgtggcagttttcagaaagggaagattaagtgttggtagagaccacaaattgtgtctactctaatcctctattaatagaacatcatgatgataatagtagttactaattattaagccataatatgcctagacactgtgccaagtacattgtatgtgtggtctcatttattccttaagtcaagcttgcaagggatttattacatctattctacatatgagaaactggagaggcagagagattaagaaatgtacccaagttcacgtagcttgtaagtggcagagggtaggattcaaacccagatgtgtttagtttcaaatccaagtatatctagcacttatattcataacatggctggcttgcaataatccattcaaattcaaatacatatctacatacataacagatgacagaatgtgtgtgtaaaaggttttttcccaaaaataatcagatgcctttcaaattattaagtaacatgcagctaagggcccatttttactggcaactttaagggcattcgttgattctaatcagccaggatttgctatttatggatgttgcacaattcaactaaaagtcacatttgtccaaaaaatatacgagttgaagcaattcattagagagctaatattgccagattgcaaggggaaaaacataaaatagttcattgacaaatctgtaccctcagtgccaacgatggagtgaagaaatgatggaggaggaagtggttttagactgccaagtgttgcaggatgtggaggcatctgggaaggtgagaacttcccaaagaagccacgtgaaatcatgactttctaccttgcctttatttcagagtttttcttgctcttatggaggcattgtaggtcgacctggtaagccacaaactaactttgaatacattctccctcccattggtgatgctggttggtgtgtattcctaggcaaatgtggaataggaaccatgtattgatatttcatacatctggccaagtccctctttcagattcaaaaaatgttgagaacctatcttttttacagagatagagaaggggatctcccttgttccctttcttactgtcccagcccctcttgtataacccattttatccagaactgtgcctggctgctgatgcatgagtcacagtcttcatggactgtgctggatagagcttacatcttccaactactccatggcaacctaatcatacttttcaatacatacctctgcatcagtggtgtaaagttaaagggattctctgccttctccctgtccttctggtacttttaggtttttaggactcaatatatgttctgcactgcttggagggaatatggcataaagattaagattatgatttagagtcagatttgagttgaattctaatcccaagcttacttgctgggtgagcatagacaaactgcctgaattcatattttcttaattaccctttctgtaaattgggtgtagtaataataataacacctattttattgagttaccatgagaactaaaggagaaaaaaagaactgagcatagtgcttgacatatagttaataaatgtctaatcttttttttttgagacagagtctcgctctgtcccccaggctggagtccagtggcacgatatcggctcacagcaacctctgcctcctgggttcaagtgattctcctgcctcagcctcctgagtagctgagactacaggcgtgtgccaccaagcctggctaattttttgtgtttttagtaaagacggggtttcaccgtgttagccaggattgtctcaatctcctgacctcgtaatccgcctgcctcggtctcccaaagtgttgggattacaggcgtgagccaccgcgcctggcctaatcttcttactcttttttctttctggactacttttctgcaatctatgatatagtgttggctgatagcctggtggccagaattcagtagttctcatttgcaggcccagatatagaccctctgaggttatctgggtctatataatccagtcaccccaactgttcccctggaaatggagtgaggaggatttattagttgctgcctgaagaaaagggaaatgctccaaaaaatttggttgtttccagactcaaatagagcctgcctttcattgattctgttgcccttaaagcttcacggtgaagatgcagttgcttccaaaaggcttctttctggtgcctaagcctccttatacttgcttcagagccctttccgtgaaccagctgtgtattgctcttctcatcccaacacttgcaatggctgaataaaggaagtggggcctgccttacgctaatcctcgttcatatgtgtttcttaaagttatttttccttcactgatgaattccttttttttttttttttttttgagacagtctcgctctgtcgcccaggctggagtgcagtggcacgatctcagctcacaacaagctctgcctcccgggttcatgccactctcctgcctcagcctcctgagtagctgggactacaggcgcccgccaccactcccgtctaattttttgtatttttagtagagccggggtttcactgtgttagccaggatggtctcaatctcctgacctcgtgatccgcccacctcagcctcccaaagtgctgggattacaggcgtgagccactgcgcctggcctcactgatgaattcttttgctttttaaagaaactgttcatttattttcacagtctgcaaaagcctaagataaagatgccacactctgaaaggatcaacaagggcatcaccaagtaatgttttctgcaggataaacaagtcaggcattaaattggttaatcctgattactggcccctttctctagcctcccctctgtgtgagcagacccggaccacaggctttcttatttcctttcagcttcccttgagactgagcagagagagaaaattagctaaatcaggaatgcagggaatacagttgcagcctcttcttcagatggaggaatgcgttttggggggagggacattaaagggccagtcgctcatgttacagctctttttaacttcatgagtactaatgccctgaagaggttttaatgaatgccctcttgtgatcagttcctagggcaatcccaggttataaaaggactgcccctgcctgtgagggaactggcctggcttcagtgggccaggctgctttgttatctgttattggtttttccagctcctctttctacatttcaagggatctcaggccttacctaaggcaacagtacattagttttagagtgggagatgctcacagttttcagaagagttcagaaagtttcaaaacacacagcactgcagaagataacattatagcttctcaagaccccaggggatctgggactaaacagtgaaagattaattaggtagcggaagccactaaggcagtgagtcttagttagagaactttggtttagacaatggttctcaaaggggcagcaacaccaacaatacccggaaacttgttagaaatgcaaattcttaggccctatcctagactaatgaatcagaaattctcaggatggaggctgggtgtggtcgctcatgcctgtaattccagcactttgggaggccaaggcaggcagatcacttgaggtcatgagttcgagaccagcctggtcaacatggcgaaaccccatctctactaaagttacaaaaatgagctgggcgtggtggcaggtgcctgtaatcccagctactcgggaggctgaggcaggagaattgcttgaactcgggaggtggaggttgcagtgagctgagattgcaccactgcactccagcctgggtgacagagtgagactccatctcaaaaaaaaaaaaaataataaataaagaaagaaagacattctcaggaatgggacccggcagtctatgttttaacaagccttctatgtgataccaatgtactgtgaagttttaagaactggtctaaggtaaatattcctgaggttgtcttatatcattacagggtcagaatgcatgcaaggaagccatctgtttatggttcttgtgagaagcagggggcctttccccatgcccgagagataattgttaagagctcaagcttgggagtcagtgaccctttctgaattctacctctgccactcagtaattgtatgttcctgggaccattacttaactttcctgattctcagtttctttctctataaaatggggagaatagtggtgtctaccttatagggttcttggaagaattagatgagataatgcacacatattgcagaatctgaagaacaatcagggtttagtaaatagtagctatttttaaatgatttttccaggtatgagtctatcctacagcttcaaaatttagacccaggttgttctgagtattctctgtgggaagaatctgctatagagaagatttttttaaagtgcctgtctctttgtttccttaggggattgcttttgccctgatttgccacatctctttactctgtggaaaatggacagtttatgtgccctagttttatatggggatttatattcttaattgtctcaaggattcttacctgtctgacaaaaccaactccccatggaaagactccatggagactccatctctgatccttccccagaaagaaagcatgattcttaagttttttagaatctgtttaggagcactgtcaacatgaatttttctatttcatgagtgagtgcagcctcgggccttgttggagaatttagaaagcatgctgttccactaacctgttcaacctcaacttctgccgttgtcatagcaatgacagtcctgggaggtgtgtgcatatccttattaggaaaaaaaaatgagatcagggatctatgtgagtggggcagctcccgcctgtgagtatccttcgctgtcacctgccatctgacagcccaggagtgccagcttggcttggctttctctacccgaggaaagtaagtccttttaagatgcacttttactttctggggttgtgaaactcattgtgtttgccagagttctcttcgcagcttatgtaaagaatttgtttgttttggattgacctgaagggaggaagcaagggtgtgggaaggggaattagcatcccctacctaggagaagccatgaagcttacttaagtctctgctggctccatccattcatgactttcttcatcttcttcttgggaaaacactctgtaccttccacttttaatggtcatgtaaataaaagactagaatggagatgtcctggttttctgaaattaaacatttttgtttatgaatagactctaagataattctttccctagacgctctgtattttcttggacctctcatttgccccatagtaattattctaggattggtggcctgggcagaatacagtcatggttaagaccatgatacataatagaagaatttcttccgtaacagtagccccaaacagagatcacgtgtctcctgaaacctatccagtctcatgtgcactcagatgtacgatcctggatataacattttagagggtgtagtgaggagaatagaacaacactgttctcttaggctgcagtttccttcaagccccacgatggagagaagcaggctaatgcagggtaaggaaatagagacttattatagtttcttcagttatcattgattcctttaatatgccagctacattgaggcaatacagtctggcctctgaaaaccttgtcaggagaaacaacttttgaatatatcttagaaaaataagacactttatcccttcttttgtttaagagtgttgcataaaacaggagagtttctgaattaccctcccttctagctttctttatacaccattctttgtagctgaagttttaagccccttgtcaaaagggagattcaagtttctgctggggacatctcagtgtcacaaagggccaaggaagtagggtctcaccaactttgccacctgactcagctcaaaggtgataggtcacctgtgtgactgagagctttgtgggaaagatgatatggagggtggagagtctgcacttcactctgtgggaaaaattgctgaggttgtttagaattgttaggcttggaactcctcctgggaggtgcttgaacaagaaagacctgcttataacctgagttgagggcagaggaggaagatagtttgtaattcctttacgttttgtggctccggcaagccctgtcctcagcctcactgacacaagtaaactaaaaatgaaagtctgtcctagtgacagcaagggtctttcatggcaatattttaaaagaaactctgcccagatttcaaaggaacgtgaaaattttatcttcagaggcagtcagctttgcagttgaaaaggccattgcctaatctggagaaacatattcagttcaagcactggctagagactagaggcccccaggaaagggccataagattggtcactgccaggaagcctgtcaatgagtgtgtggactggagaggaatctttctctgcctcagcacttggagtctccgttattcacaatcagaaaaagagggagagcagagatagatgacattccacgtttttctcggtgagaccaagagcttcctcagcaacagccctgcctgaaattgtctatctccaagggcgtgggctaggcaaaggatgggagaagtcagtcctgaagatggtaatacttaaaggaaataagggggacaaaggatgcttgtgctactattgaaacaggaaattgagagctctgtagaagtcagactcaagaggcataataatagaaagttagggtatgaaaaggtgacttttaagaaccaaatgtggacccgaaagagaacaaagagaagtttattgtaactagcgttgtattccttgtctgctggataccaaacaatgtaccccgggtcttgagattatcgatgccattgtctgtaaaaaaccaaccaaacaaactttaaaaataagtaaagcctgccctgtacagaaaatctaataaagcaaatttgttggtgatgttccaagaaggttcaccagcttgggctttcaaccagcattgacccaatcttgtgtccagagctgttgctgtaggtggtatcatgtatcaagctgaatagtgaggtgacattccccaagtcttctctcttgtcttttttgactgtgcatcatagatactgtattacccaagaacacacacctgttcgatctcttttcctataatcacctggagtcagatgaataccgtaaaggtctgtggtaagactagaagcctcagccagtatgaatgatttacattagatgcacaccaagctgctttcggagagtccagatttatggggataagagcatcactaggtatatcaacagccctagggtggatacctttgagcctgtaaatttggctctgtgttggacgatgaaccatggaatacagaagaagctcccttctctcagctaaagcctattagcaaaaatagagccctgaggacattgtattttaagtgtatgttccagtgagtgggtcgttgctgggtcaagttttataagtctttaaatcccatactgttgcctcctggactgtagaaatagtctcttagaacaagagaaaggaagacaatagctaccatttattgagaactgtgataagcactttacatatgttgcatacttaactttgagagaagtacattattattcccatgtttcagataaaaaaattaaagctcataagaattaagtggctttcttacattcacacagctagtaaaaatgttttttgctcaccattgtattcccattgtcaagcaggatgcctagcacacaatgatgctcaataaattttgttaaattcattaataaatgcagtggtaaaggcagtatttgaactcatgtctgcttgctgctgaactctatacacttaacacattactattatcttgtcccgcatgatacatgaagggaatagcttggtaacttggaaaagactatttactgtctgagttctaggccaactgtagggtgtctgtatttatttcccattatgctataacaaattaaccataaacttcatggcttaaaacaacacaatgtattatcttacagttctggaagtcagaagtccacagtgagtttcactggctaaaatcaaggtgtgttcttgccactatataacaaggatccactttcctttagtttccaataacaggctccttatttctacctgagccctcactggcagcacctttaatgccatatttgtaataacaatctgttcatgacaatttaggtttgctcctcacttttttctgagtcctctctagtagagccattaatatgcatattgctactagcagcctgttcaaggtaatgtaggctctttctatcatgctcttcaaaattcttctagactctgcccatttcccaatctcaaggccacttccgcatttttaggcatttataacggcagaaccgcacttccagataccaaaatctgtattagtttcctagggctgccataacaaattaacacaaaatcccttttgccatgtaacataacatattcacaagttctaaaattagaatgcagtcattttggtggggccattattctgcctaccacccggtctttcatgttcaggcagaggtggctctgtgtgtgtgtgtgtgtgtgtgtgtgtgtgtgtgtgtaagttaatttcagtagagaatgagctagagtagagaaagagaattaaggtgagatgtgtcatggaagaacagtgactgatgatgctaactttgctcaatcaagaagtgtgatccatttaaatcatgctttcagtgatctatccaatcagataaactactctcccttcctgggaagagtaaggaaggaagtagagctaaagatgaaagttcttttcgtagcacatccctgcaaaggatgggagtattgttttggtgggcattcccttttctaagagcaaagatggaaatgtggagagaggagaaaaatggttcccattacattattgtgttctggacttagagatattgttctgccccaggtctaagaatattgttccaagagttgggagcaggcagcagaggacagtactctttagatcacccagaggccaatctgtaaggattcaatcctggggcatggtagctaatggaaaagtcactgtcacaagtgatgccaggagatggggcaacacatattgcctgccttgtatgcatctagcgtctgtgtctaagtgaaagcagattatatccagaacttccctggaaaatagaagaaagagcctgattggtgtgtatgtgtgtgttaggggttgaggggtgggtaatgttcctgccagtattcgtaaatcccacctgcttttcctgtgatgcttcctgtgttggggataggagggtgggatggttcagggtcaattttatggatccatatgtatctaaggatgtgtttgttttttgggaacattttgtataacaaccagtttcactctagctccctccttgatattctaaacaagctggatatctccaaagcttaggccctctccatacttacagcagctctgactggagattaaatcaccccttatactgctgacaatgattaggccatgggacccatgaaagagcctccccagagtccagcatcccctgtgggctccgtgtgtcatcaagatgtcaatccaactgctgttcctgcagtctgcaatcagcagggctatgtttattcagcggtcagtgtcacatcaatttccttctgttgcaacaagtataaatggattctaaatatttgcctttgggaaatttctttagagggaaactcactaaagctaatttttttagctttttggtatgttctctctgaatctggggatttagatatataaattagcttctttggtcttttcttgcccagggtcacaaccttgcctccaggataataccttctaagtgtttgtgatttgaagggcactacgaagatcctcacaaaaactacctcccagccgggtccctgaaactccatcattaaccaccttcatcagcatttctcttttaaaatccttattcattcctgttctccttctttctttctcacacacacacacacacacacacacacacacacacacacacacacacggggagagagagacagagagagagagagatagagaagtgaagtatatagtatcctttctagggatgcttttcttggcttggctccaatagagaattttgttgggaccctctatatatagtcgtgtaccaaataatgacactttggttaacaatggaccacatatgtgacagctgtcccataagattgtaataccatatttttactgtaccttttctatgtttagatacacaaatacttgccattatattacaattgcgcagtattttgtacagtaacatgctgtgcaggtttgtagcctaggagcaataggctataccatatagcctaggtatgtagtaggctatgccatctaggtttgtgtaagtacgctctatgatgtccatacaacaaaaatgcctagtgatgcatttctcagaacatatccccattgttaagtgatacatgactgtagtcatcatcaaacatttattaagcacttaggtcaggccaggctctgttctaggtgatgcagatataatattaaatataacacagtcctgcccttataaatctaatggtgaagggagaaatgtaaagaaatatgatggaaatattacattgtcatgtgataagggcgacaataatgccctacgtaggtagggtcaacgaaggggaaggaagctgggacaaaccaccagggcctgttggtccagaatgggacccagggtctgtctatgttataatcaattcaaaccctaggtaaataaggtaagctaggctgcctttcttgagacagtccccagattgttttcacagggcccaaacactctcagcaaccatgaacagtggatgttgtgggacctcagaagatggaattggaaattcaggggactaagtcagagattatttgacatttaatactggatattgaggccgggcgcagtggctcacacctgtgatcccagcactttgggaggctgaggcgggtggattgcctgaacccaggagtttgagaacagcctgggcaacatggcaaaaccccatctctacaaaaaaaatataaaaattagccgggtgtggtggcatgcacttgtagtctcagctacttgggaggctgaggcacgagagtcacttgaacctggaaggtggaggttgcagtgagctgagatcacactactgcactccagcctgggtgacagaatgagaccctgtctcaaaaaaaaatttaaaatactgggtattgcaggatggcaagtaggatgtggagaggaagagaattccaggcaaaggaaacaatgcgtgcatgcaaaaacaaaatacaaaaaactgaattgtgtagtctgggttaataagatgagtgcatttgatggatgtggtagaataaagagatgttaggaaatgagatcagaaatgtagactggaatcagattttgtaggaccttaaacatcctgctaaataatttgtagtttcatttgttggccatggagacccactagaaggttagttggtttgtttatatttaggaaagaagattcttttaagtttccttaactctactgaattttcaaaaatcaacctacagcaatccaaacttatctgtggagatacattccaagaccctcagtggatgcctgaaacctcatttagtactgacctttatatacattatgttctttcataggtgcacctatgataaagtttaatttataaattaggcacaatactcttgtgctttggggccagtattaagtaaaataagggtacttgaatacaagccctttgataccaaaacagccagtcggataccaagacactttctaagtgaactaacaggtgagtagtgtagacggcatggataggtcggacagagggatgattcacgtactgggcaggataaagcgggatggctcgagatttcatcacattactcagaacagcttgcaatttaaaacttatgaattgtttatttttgaaatttttcatttaatattttcagactaaggttgactgtgggtaactgaagcctcagaaatcaaacctcaaataaggggcgatcactgtactgaataatatgtcaagatgagctatgagcttttaacttagtgtttttcttctcccaaaccaaatattggaaactttggagtgtttagaaaaggagaatcgaaaagggaagtaaatgcagcattttttttaattgttaaataaagggctgggcttggaaatgttcttaggtaatcctggtggatttggtatatcatgtctgagaaaatgtggagagtgaagggcaggtttaaaatttgtctcatgttagtttctgaagggagatagcctggcattgcacagtgcctcacatttctatcgtatcacttaataattgtgcaacctgtgcttcagatttatcaatgtataaaagaggagagaccataggctgttgtaagtattaaatgacataatgcacgcaaaatgcttagaaccatgcttagttcatggtagccactcaaaaatgtcgtcagaactattactactcagtttaatgctcctagcacttaacacagtgcttggcacacagtaaagaggattcaagatgtttttgctagattacatggaatggtatggaagtgtgcagggtggtgtagagggttctcccattatcttgccttccttatactgcaatgtgctgacagcacctccattttataccctcaatgcaaggatatcactacttgtctagaaatggttgctcaaggctgagaagtgacagcaacacagagcctgggattgctgccaaatttcaagaagcacagattgtaacaaagtaaggggggagggtagagaagaaaagtttgaaaacccaaccaaagtcagaagccattttgttgtcggctgaaataatgcctcatagagtttcaggtggggcaggcagtgtgaaaactttgggaatagtcagtgtcaagttgtggtgctaagggaggaacccagtagtgctcaggcctgggcaagtctggcttcttggggcccagcatttagaaaggccctgtgtgttttgatattatgctgtcactatcttgaagttcttgataatttgttaacaagggccgcctccccccattttcatttggcaaatttcactggttcctgcaaattatgtagttaatcctgggtgcaggctagtttttgaaccatgttgggctagtattcttctgaacctctatctctttgatttaattacagaagaaacaaaagtcataacaaattatatctgtgcaggactaaaataaaatgagtagtgcctcactccctacatccaatcatgctttccaaaagtaaccactaccaataatttagcgtgcatcttcagaattctttatatgcctacattttaatgtatttttaaataaaatagaattacattgttgaagtaaatattaaaaaatatagcatttttgcatagaaatatttatttccctcaatcccactcccctttggtgaagcaaccactgttaacaattttgtgtgtatcctccaatatttttttgaaattaatgaactttactttttagagcagttttaggttcacaggaaagttgagtagaaagtgcagagttctcatgcactcctgctctcccacatacacaatgcccccacacccccgccacagtgacatcctgcccagagtggtacattcatgacaattgatgaaactatattgacatcattattgaaactatcattaccacccaacttccatgtttactttagggttcactcttccaaatatttcttgcatcacttaacaatggggatacactgagaaatgtgtctttaggcagttttttcgttgtacaaatatcatagaatgtacttacataaacctagatgatatagcatactacacacttaggctctatcgtatggcctatttctcctaggctacaaacctgtatatcatgttactatactgaatactgtaggcaatttttacacaatgataagtatttgtgtatctcaacatacctaaacgcagaaaaagtacaataaaaatacattattataatcttacaggacaactgtcatatgtgtggtccgttgttgactgaaacatgattatggggcgcatgactatatagagattttcaaaaagcaaaatgggataatgcaatatgtattattatacagcttgtgtgtgtgtgtgtgtgtgtgtgtgtgtatgttaacaaacacctttctacgtcagtacatatagatttgccacaatcttcttgagtaaggatatagcactatgttgtatacctatattataatttatccaatttgctgttggtatctatgttttctaaacaatacaatatacattcttatacatatttcttatgcatgcttgctagtatttatacaggataaatttcaagaagtagaattacagaatcataggatataaaaatatcaaattggcaaattggcattcacgtacctgtggttggactgcacttgttacatacttccctctgagccttccatccccacctcgagctagtgctatatgtcacttaactcagtgacatcatcatcaacagacttagcctctgcagttgaaaatgctagagcaaacagaggagaaaatttacttgtgaatcataatagctaacctgtactgaacagttaagccatgtgccaagtattattctaagcactttacaagtattaactcctttaatctgtataaccacacccagaaatttgtgcattattatactcattttactgctaagaaaactgacacccataggattaaatcagatcacacatttagtaagggcaccaggatctgaagcaggattgtttgacttctgagtctgtgctcttaaccactgcacacaccgtctctagaaagtttaatgccatctttatgccaaagtttatctacctggtttatcctttaacactattattgtatttattcatttacttgtcttttcctcccactgtgctgtaactctttgagaacagggtacttgtcctaatattattcatatttatatccctaattcctaatttaatgtctaatttattgtaaataagttttttttttttgagacagagttttgctcttgttgcccaggctggagtgcaatggcacaatctcagctcactgcaacctctgcctcctgggttcaagtgattctcctgcctcagcctcccaagtagctgggattacaagcttgcaccaccacgctaggctaattttgtatttttagaagagacacagtttcactatgttggtcaggctggtctggaacccctgacctcaggtgatctgcctgccttggcctcccaaagtgctggattactggtgtgagccacatgcctggccttgtaaataataagtttagttgaataaataacaatgcctccgggaggtagctattatatccattttacagatgaagaaactgtaagtcaatgttaatcaaatagtatcctagaaaatagtagaaagcagaatgctggagctgagatttgaacccaagacttttgatacttcgtccagtgtgctttccaccatgcctaagtagtctccttcacttcctccttcagagggctatggagagtaacctagcaaccatttctaagctggaaaatgtcacagccggaagtcttcagtcccctagaaggaaaagagcctgatggggagagggtccttggaaaagagaatttctggaagtactacatttgagaataggtggttaaagtgggagttggattagtaaaggaatactgcatagtagtaatacccattctttatttcagaatttcttcatgacagacattgatctgtgtgatttataagccttgtctctttttaatgttcacaatcccattagatggttattgttatctttgttttgcatatgaaagaatgggagctaagaggccaagtaccttgcctcttattcgttcaacgaataagtggtgaagcagattccaactcaagtctatgttacccaagaacctacattttaagcattttgttaccccctggatatgacagccaatgaagagggggtattttgagaagagactataaagggaaattgccttccctacatcctgggggaccttatcaaccaggaaacaaggtagagaaaactgtgcagcctgagccctgctgggttgcggggggctcacagaaagaagaaatgtgatttttttttagctaactacggagaccagccattccaatgtttgaatctgggttcgcagcacatgatgtctttatactcttaacctagaaatggcagagttattttgggcacaaagcaagagctgtggctttaaaaatatgccaagtgtatttatctcttccgctccaagattactgaaaattagcccagctgtagcttgggacaccaaacagccaaaaaatcttcttccagctcaactcattccacccaaagagggtgaaatacccaggagtagcagctctagcggcctctgggtagtggtattagattggcctccccattgctaagcctgacatccaatcacacacacaccactctcccagctgctctgtagatcacaatgctaggcctgtgaatggagctcaactccgtctcttccctcatccccaaggcttcacaagaagtaaacaaaacaaacaaaaactatttgattattgagccaaggagtcaatgtgagaatagtttttcaccttcattatcaaatgcctgtgtggagctgaatgtggtggctgacacctgtgatcctagcactttggggaggcagaggtgggaatattgcttgaggccaggagttcaagaccagcttgggcaacacagcaaggccctatctctctctctgtctctctctgtctctctctctctctctctctctctctctctctctatatatatatatatatatatatatatttttttttttttttttttttttgagacagagttttgctcttgttgcccaagctggagtgcaatggtaagatctcggctcactgcaacctccttctccagggttcaagtgattctcatgcctcaaactcccgagtagctgggattacaggtgcctgccaccatgcccagctaatttttgtatttttagtagagacagggtttcaccatgttgggcaggctggtctcgaactcctgacctcaggtgatccacctgcctctgcctcccaaagtgctgggattacaggcatgagccactgtgcctggcccctatctctgtatattaaaaaaaaaaaatcttagccaggcatagtggcgcacacctgtattcctagctactcagaaggctgaggtgggaggatcacttgagtccaggagatccagtctggcagtcagccatgacctcaccattgtactccaacctgggcaacagatatagacgctgtctctaaaaaaaaaaatcctgtgtgatttaggacaaattatcttgctgtaatttaagccttcatattccttttttataaaataaatatgctttaaatatgtatttagatatacacttataataatagctttaattaattgtaattaaatcatttaaaattaaatacatgcaaaataccccataaactgtctaatccataataagcaatcaatagtccttaaacaaatgaatcttctgttgctctgatcttaataagtaaaatttaacgagtttttactttgcaccatgcacttatgctatgtgctgtataaggatagttacatttaatctataaatcaaccctatggggcgggcactcttatgaactttttttacggatgaaaactgaggcccagagatatgaaataatttgccaaacatcaccataatttacatgatgtagccaggtttaagcctactattctgattacagagcctaagatcctacagagaacagggagtatatttttacattcccttgtttccatggaaaagtctttccactgtcaattgaaggactaagcagcagcggggaagtgctggaaatgctagcccaggtgggcttagctttctccctctctctctgatcctggacaggatttgggtttcagaccacgattctcctgtgttttgtgggctgtgattactcagattaggtttgcccaattcataaaggactggcgggggttgggggtgaaggtgtgggagaaggcggagcttgtccagtcggtccaacaaaccccacagatggcgaaatagggggcggggaaggagcttgagatattttacaacctgggctgtttcagtggttgatggcggatggtttttgccttttggtcagcctgagtatatactatcattctacaatcggccaaattctgacagagagggagacagagagagaggttgattaaattgatgcccaaaaccaagaaggagcaaagaaatcggggctgtttgaaaaagactgcagtggctgacttgggtggtgagcggaaataaggaggagggagaggcggggtgtctctgcgcggaaagcctggaagttcacttgcaaacacagaatctgcacagccttcggtgccctgactctttcctgggcatccagaggcagcagcagccgccagcgccaaagaacgagcagtccaggggctgggccggaaacggctataatcatttaatagcctttgccggctgcactgacttagcagagtgggcggtaggcaggctccagagtgctgtctggcaagatagtccccggctttaatcaaaatgatgggttttctggaagctctttattaacctcagcactgaaatcccagagctggtaacaaagggatgaatggggagcaaaggggcggggccgaaacctggaggccgggctgcatccgcaccccttcccccacctccactcctttcaactcattctggcttagggctcctgctggcatctctgtgcctcccaaatagtagtaacaaaacaggcaataaccataataattggcacatttgtataacgctttagcattttcaaaggatgaccttgttatacagctcaggatctgagtctcctagctggagtcagactccctagatttgagtcccaggatccaccagttagtgaccatgtgaccattagtccttagtcccctcatctataaaacagacacataacacagacagagatactagaaatgtctacttcatagggctcttgtcaggaccaaaacctatacgacgtgcagatttgtttaactctgttgcacacacataggaagggcacagtaaatgttaactacatcgacaaccctgtgatgtagacaggaaggggatcatctccattttatggatgaggaaactgaggctcagagatatttatgtaaatggcccaggactatgcactagtgagagaaccagggcaagtcctcaagaacagaaagagaacaaagcaagatgaagagaagatcagaaaagtgaacaccctccaacaccctccagcacatgcccctctgagagctttcctgaaaatagtatccttggtcaaaatgagtttatgttctattagggaaagtcagtgtaaatcagaaaagccctcctggccttaacagaacagttccaaatgcagatgagggtgagtttaacaggcctggcatttgcttcacaatcttctggccctttcctggcatttgccttggcaaagactctgacctgatcaatcctagtccctgaggctcaactccatcaactcaggcagccagggttagtttagcatgaaagaggaaagctggaaattttgccaaaaagattcctgggcagtgcctaagggaagtgcccaaattggattataggattacatgaagtggccagctacttccagagggcagggttttttgtttgtttgctctgtcacccaggctggagtgcagtggtgcaatctcagctcactgaaacctccgcctcccgggttcgagtgattcttatgcctcagcctcccaagtagatgaaattacaggcgtgcaccaccacagtctcgctaatttttatagttttagtagagatggggtttcaccatgttccctaggctggtcttgaactcctggcttcaagtgatccacctgcctcagactcccaaagtgctgggattttagatgtgagccaccattcccggccccagagggcagtttttaaagtagaagtgaagatctgtatgcatttattaaaatatatgttgttctgattttaaaatatatccctaccaattgtgaagatatcggctaatccaataaaaaagcaaaaccatattttgtataattatggtcgtattctgttaaataaacttttaaatcctattgggttgtaatctgtagtctgggaagggctctgcctaacgattcagacccctaccagatttatatgtgtctgaaatcctccttctagcctcttaacaggcccattcatttgggtcttgactgcatcctcagtcttgtctttgcctgagggtgagctaggaccctgggagcataagggaggggacttgccggagatcctagaagggaaaggaggcagcactgaaagaagaaacatttccttgattgatcatttgctgatactggcccctggttggggttaggggtagaaatgtgcttcttccgttttcatcttcttcaaaagggagtatctccatgattctgccccaaaggcatgacattttataggcaaagccagccaagtgtcttgagtgctcttaaccaaaaggaattcagattaggaggtcagtcagtgtttgtcagatccttaagcttttgttttactggaatgagtcacagtctacatgctgctgagctctcagagatgtttgttttatacaacaaccagaacaggtgaggcacagtggtctgtgagggactggagagaccacaccttgttctgctctgcggaagctggacatgtggaggaggcacctgactagatctctgcctcctggagtttaggctgagtcatatagaaccaggaagctcagtgacatgttaaagtggattaactcttggcagtcctgctgtgaggggctccctctgccaatacacacagccattaatgtcctttaactgtgcaagatgaacatatctctgtgttctgcatctccagatgacagtgcttaggcctcatgcagagtcctggttatggttgaagaaaaatttccattttgggctctgagggcaactaaaggactgtggagtggtgctgaaacccagttttaggtgccgaatcagaggtttttaaatacatttctctcttttgtctcagtctcttagagacaggacctgtattttaaaggtaaacaggcagattctggctgagctcaattgcagatttgattaacttagatagatcaaagtcattagtctcagagaaaaaatttgtttctcatccctaaagtgctattgtgtcagctctgccagggtgtaaggaaaagggtttggaagagagaagaaaatttcttaccctctctcgtcactgcctgctgtaaatttgcagtatcattatcttggtctcctaagccctgagagctgcattatatataattgcccatatgtgataccatttactgaattcttgcattgtgctaaggatcaagcttagtactttacatgcattacatcattgtctttagggaccccaaaagtgcctcattggagagttgtttggtctgctaaagagtgggtaccactttcacttctcacatcagtcctttcattcattcatccagcaagtatttactaaacacctgttatgggccaggaattgtgctaggcactggtgatacattggtgaataaacagatacattttttgcctttgtgaatcttacagtggtagagaataataggccaagggggtgctgcttggctaggaatgtcatagaatgcctttccaaggaggttacatttaatacagacttgaagagtgaggagtcatgctaagaatggatgagaggctcacgcctgtaatcccagcactttgggaggccgagacgggcggatcatgaggtcaggagatcgagaccatcctggctaacacggtgaaaccccgtctctactaaaaatacaaaaattagccgggcatggtggcgcgtgcctgtagtcccagctacacaggaggctgaggcaggagaatggcgtgaacccgggaggcggagcttgcagtgagtcgagatcgcgccactgcactccagcctgggcgacagagcgaaactccgtctcaaaaaaaaaaaaaaaaaaaaaaaaaaaaaagaatggatgagaaatcattcaagacaaaagcaaaccagatgtgtaaagatcctgaggcaaaaacaactccaaggagccaggtatggtggcctgtagtcccagccacttgggaggctgagacaggagggtcgattgagtccaggagtttgaggttacatcaagcaatgattgcaccactgcacttcagcctggttgacagagtgagaacctatctctaacaaacaacaataaaaaaacaattccaaagagtgtttgaggatctgaaagaaggcctgtatggttggagtataatagtaagagggagatttgtagatgagagtggagaagaaataaaaatcagattattgaagggacttatgtatcatggtaaggagttttttttttttttctcaaggcagtagaaagcttaagcagaggagtgatataatctgatttatatttttaaaagagtttgctatatgtatgttatgcctcatttttttttaaattttttatttttagatggagtcttgctctgttgcccaggctggactgcagtggcacgatctcagctcactgcaagctccacttcccgggttcatgccattctcctgcctcagcctcctgagtagctgggactataggcgcccaccaccacgcccggctaagttttttctattttttagtagagacgcggtttcactgtgttagccaggatggtctcaatctcctgacctcgagatctgcctgtctcggcctcccaaagtgctgggattacatgtgtgagccaccgcgcctggctgttatacatcagtttttaaagagagacattaagaaataaagatgactctggctactgtgtggagggttggagagaagcaaaagtggaagcagactgaataaggagactattgctgcaattcatataagagatgatggtgtcctgaaagagtggtggcagtgaaaattgggagaagaggacagagtcaagatatatttaggaggcagaaatgacaggtcttgatgatgtattataaatggagaatgaagaatagaatagagaaaaatgaataattagctttgaactttctggcttgagaaatggggtaaatggggtgtaatttactgaaactggaaagatttagaaaggaatagattcgaggaatcaagagtttgatttcagatttcttcagtttgggatgcccatgagatttccaactggggataccagataggcagttatacatgagattggagcacagagagatgtgggcttaaaatataagtctgcatctcatcagcttattcatatggtatttatatctatggatatggctgagatcccaaaaggagagagtgaagagaaaatagagaagagagtctagggccaaacccaaggaagcttcaacacacagatgaggagactgacaaaggaaactgtcaaagaacagtcagagagaaaggtcaggagaatgttttgatggtgggggccagaatatgctgtcccaaaataagaaggattgttgagctgaaggcaagttaaaagaagcagatacaggctgggtgcagtgggctcatgcctgtaatcttagcattttgggaggctaaagtggacagattgcctgagctcaggagttcgagaccagcctgggcaacatgatggaacaccatctctactaaaatacaaaaaaaaaaaaaaaaaaaaaaattagccaggcatggtggcatgtgcctgtagtcccagctactcaggaggctgaggcacgagaattacttggacctaggaggcagagactgcagtgagctgatatctcgccactgcactccagcttgggcaacagagcaaggctctatctcaaatttaaaaaataataatcatgataataataaaagaagcagatataggagaggtcttctgccctccctgtatttgcctaaaaaaccataaatttacaaagacaaaagttatcctacttccacctccctcctctgcctcccaccaccagggagaacaaaggttaaccactgaagataactttggactcttattggcctggaaatggtactgctttacaaattagcctttatctgccattcatttgccttcccccaagtagctacccattagagactcaaagtccttaaaggtcttttcctttgtcttacacttctttaaaaatttattgttctttgttgaagatgctatataagctggaattctaagccacctttttgagaactgctcattctctgggtgtctgtcatgtatatatgaaatgtacatgttaataaacttctgtttccttttttttcttgttaatctgccttttgtaacaggggtccagtccatctaagaacttattggggttattctacatgacaaagaactcatgagaataagtgtttcaagaaggggatgacaaatgctgctgagaggtttgataagatgaggactaaaatgtgaccattgattgtggaagtaatataatgaacttgacatgagttatgttagaaaattactgctcagggacaccaaattagaggagactgagaagtaataggaaattgaaatagcagttgtacccaaccctaaactgtaattgaacataaacagtttatttgatggagcttttcacgtgtcaaccaaaggagcagtgttagatacataaacattgctatgatgtcagagttccaatgtcatggccactgggatcactttgcccagacagaccattacccttcctctccagctctgacttctactcttctagaagtcactggtatactttatggtgtgtcttccaatcagactcttgggaatgtcttttattgaaaactcctgtggatgcataatcattttcccaagactcagggcagatttcacctcctctggaaccccattaactttctcaagtataattaacaatttcttcttctggagtcccacaatactttacatatactttagttattgcatgtattaagttggtttctagttgcttgagtgtatgtccaactagactgtgagcacactgagggaaggaatttggcttggaaagtaaaattggctcccagtgttttatctaaacaaataggctcaatttacaacaggattccatcctcttacgctgtgtattcccatctcttccatgctgcatcccaccacccttcaatgttattacaataaaattaagatcaaataatttattcagctaatttttcttgttttggacaaaatagacatcctaatacatttatagccaaagtttaatctagacactaaaaggagcatattttgcctttaggctctgtatttcccatcccgttcccagtcaagataatcacaactgtattctttaggaaattcttcacaaagaaccaaacatatgttactatgaaactagattcttggtatcctggtgaaaaaacctgccctcttgcttgtctgtaaatactggccttggctgggtgtggtagctcatgtctatgattccaacactttgggaggccaaggtgggaggatctcttgagcttcagtgtttgagaccagcctgggcaacatagtgagatcccatttctataaaattttttttaaaaagctagcctggcatgggagcttgtgcctgtagttccagctacttgggaggctaagatgggaggattgattgagcacaggaggtcgaggctgcagtgactgcatttcagcctgggtgacagagggaaatcctgtctcaaaaaaattaaacaaataaataaataagtaaacacttgccttgccctcagacttgaacaaacaactcgtgatttttctggggaggttcagcctgcctatgcagtactcctgtactctaccagcagtgtggcatcaagagcatgtgttgaccctgttaatgatttgtaatgttttgtctttcagaaccagaggcaggagaagtgtcccctccagtcggtgcgggtgtcaacagcaacagctggacctttaaatacggaccaggcaaccccaaacaatccggtcccggtgagttgcccgacaaattcattatcccaggatctcctgcaatcatctccatccggcaggagcctactaacagccaaattgacaaaagtgacttcataaccttcggcaaaaaggaggagaccaagaaaaagaagaaaaagaagaagggtaacaagacccaggagaaaaaagagaaagggaacagcacgactgacaacagtgaccagtgaggtcctcaaatggaaacaagccacttagccagtttttgtaataatggcaaatctctcccatgtagcaattccctgctcctttttcctatctacatgagccctcttagagacctcagaaatctgcagaaagttccctgtgtctgtctagaacgcatttaacaggttttgtcgtaaaagctttactaagtctggtgttaactctttctctccactctggcttgttttcagaacctaaaaagcagacccaagtttcctttctcctccgccgcaaaggagaggcttcccagccccgccagtgagaggttggactctctgccctgtgctccggggatcctgtcttgatgacacttgcagggcaggctgaaaagttttgagattgagcagcttgggagtttgtggccactgggtatgtgtggctaccgcgggtatgcgagtgccagatattggctgagacgagccagcttagactaattggtacaaggaaggcaagaaaacaaagacaaataaacagcggaagttatcagtatggaggggaagtgtaaacttaaagggaccagactttctaaatcttacaactcaagaggtggcagccaccctctaggagacaaaactacccccactgacaaggctttaggagaccctaaagtctgttggctgtgacgtcattatacctaaaatctgcatcatacctgcaagccaacagttcagtgttttaacagagaaccaccctgggaaacagaagcagatctgatgtgtttcctatacatgtcctgtgctcactttattaaaaattcttttgcacacaatgtttatgaaaaggccagatccttttccaatacttatgcaaaagcaaaagaaaaccccgacacctcacctttcgctgtttgttgtttcatagatttatttaaaaaaagagaaagtctatagctataaatctttaaagagaaatatgaatacaattcccctaaactctcctcaaaagagaattcagtctacagccatttaaatgatcattgctgctacagaagtgctttaagagaattgcctgaaacatctgtattatatcggccacctgccaatcacagctttactctttcaggtcactctggggctgcctcttgcatgtattactaaataaaatgatctctctttctctctctctctctcttttctaagaaacaattatgtgcactttgatacacaaccttctctaaccaactatatatcaagacccaaaaattgaagaaaaatattgttttctcatacagtgagcagatttttcaatctactaattctgtgacttgtcttggtgtgctagcctacaccttctctttggtttagttttccttttctataacactctgaattgctaatcttactaacacctatgatgttacctgaaatcaatctcccatatgtatgctgtatgctatgctaagactcctgaaatatacttactctgtgcttgtgtatgtgaatgttaatgcaactattacctagagtgaactttaagctttattgttgaatgtaattccattatatttccttttgtacacctgtgaaaaagtggagtagtgtttttttaaccattgttaatcagcttttgtgtatgaaagacacagtaaaatttctttcttaaatcaagatactggtgattcaaggaattttatttatggtccagccaagagccatctcgtgccaagacttctgctggcaagggaatggataaagctgttttgttctagtaacaattttggaatgaatactgacaatattccatgagggtgtgcaagcacaaattttaccaatctgacctctttgaagttgcagaatgctttgaaattctaatggtatctgaaatatcagctcatagaaagtaacaaaatttgctgtcaccttaaataagacattttaattttgttataatgtacaatttagaagtttgattaattatattatctatttaggcattaatataaaagaggtaggagtctgttatttaaaaaaagcattaaatttaaaaaaaaactgtcttgtctacttttagcttcattctcccatattttgaagggtgtgtaacttcagctctgcaggattgcatggggtaaaacttgttaccaacacatgtgaaccattgctacattgtaggttgtgatcattttgccccactgaagcccatgtatctgaccttacgtgccttttgaactaggagaatcgggctaatttattaatgatgataattataatgtatctgtacagcactttttacatttgcgaagtgctttccaatccatgttagttactagttattacagctgtaaggataaaacacgtcatgtggattcattttgaattggtgctattggtatttcctctgttattgctaataaatgaaaatggtggtatgaaagaaatggtggtcatttctaagaataggaggaaatagaacactgataagcaattaatactgaagaagattgctgcagtatgaaactcactgtaacactctcttatcacgttagcttttatgtccattactaaggcaaaagccccagtggaatcaagattcaaacttcatatcattagaatgggcagccaggaggttgctgcgtcactttgtagttacactatttcagttttctctaataagaattgcaacaaacccatttttatcacaagagcccttctaggcatctttttcattacttgtttagcccttgcacctctctacaattggaaagccaagtgacaccccaaagaaatgaacttttaggtcagggatagtggctcttgcctgtaatctcagaactttggaaggccaaggccagaggatggcttgaggccaggagttcaagatcagcctgggcagcatagcgagatcccatctgtacaaaaagaaataacttttattgagtacagggtgtatgccagccacactactgcataggttcagctgtgacaaatagattgttttgtccttttgtagttaaatttgtataaatataagctttagatgctgtaggttctcagttaggagcaattttgccctcctggggacatttggcaacgtctgaagtcattgttgcttttcattacttgaagtggagggtgctattggcatctactgggtagggggcaacgatgctgtgaaacacctggcaatgcacaggacagccccctataacaaaggatcttacagcccaacatgtcaatgtctcaaatcaagattgagaaaccttgagatagagtgaccatataatttgtgtagtccacttttgaaatggaacaggagacaccattcgttattacttcaggattcaagatgtaaactgggactgtcccaggctaactgggatttatagggactctataaataaactggtatagctgtgccactaactagatggggaatttgaggcaaaccactacttctctcagtttttcagtcatctctaaactggtcataattataatacagaccttatagatttgtgaggtaatcttaaaaggttttagcaggtctggcacaccatagtactcaataaatattattatttattaatccttttcttccatttccttacccccttttcagagatttagctattagacccagggaacttttcctactgactaaaatgtgaatgagggatggccaaaaaaatcaacatagtcttggcaataaaaatattttatttactcctccgctcttttgctcaccccaggaggaaaagaaataaagtcagtttcataactccttacctatttctatcataataataatcaaatccctaagtagtcaagtggccagtctgtttgcagctatttcacctcaattattggtgatctgaaagccagaaaccaaagggtttgaagtacaacagcttgagagagaaagagaagagtc

SEQ ID NO: 437 - DNA, 214146 bp, Homo sapiens
  source 1..214146: mol_type = genomic DNA
aaaatctgagtaagttgcagtcctggcttccatttcatgaatacacaggaaacaaaagctgaaatgaaaacttttcccctaaatatttaaatcacatgtttgatttcatttttaaatggtctgggtataagcaaaaatttgtacattattttatttctctaaatttgacctctttccataaattttctttgccccacttccaaatgcggcgagaattcatgcttctcattgaattcacagatatctttagaatgttttattgcttagtgttaaatatgttgagtaaatactggcttatgttcctaggttacttttctcccttcactgtttagttaaataatcaattctttcaagtaacaacttttaaaaaaactggaatctagaaattcatcaggagtggagatcatcaaaaacgtaattactttatattgttaacattttagtatatacaggtaaattcaaatacataaagagtgtggaaaaattaaacctaatatattcttaattgatgtgatgtgagtgtaacaaatatacaaatcacattcccacaataggaaacaaatttcctgtttgaatttctctgtaaaggaccgacttctgaaatctttatgtaagttacagtcaagacagttgatgaggctatagttcttgaaaaaggggcatgggagggaattacagacattctacaaatttaaaaaaccataaatgtacatattttaagaaattaacagttgctgtaataacataaaagtagatatatgtatgttttaatatatacagcacacacacacttttaaatacttcaacatctcaatgttttgatgatcataaatctgaaaggatctgatttttctataaaatgtaacttgggtggtaaagaggttaatggtaagttgtcttgaatcagattgaaatcccatcgtaccaagagataatatcgttttacttaacctctatgtgtttataaaaagcgaataatattaaaacttatttcagaggattgtgataatttaacgggataattccattaagacaaatagaaaagtggctgtcacatgggaaatatttccaatagatgtccactgttaaaacaggaatcacaatattttagtgtatgtcatgaattagcacaattgatagtgaattagtataaaagttctaaggaaatatttagataaaatataaggactttgaggagtgaccgaaggatattacaattgaaactagaaattttgggaaagttcaaacgacatacaaggaaaagaagatacgtttacatatttaatacttacacgtttagccacatgatgtcgctgtccaccacaaggtctttctccacaaaagaaataacagcgtgcattacgtattcagatactgctttgcttcatcctctctaaaatttaacaccgaggagtttaagaaatgaagataaggaactcgaattatttttaaactttggatcaatgtaaaggcaatctaatatttggaaaatacttgcaatgttgttctcctggcgagaagatcctggagcccagtgcctgctgctttctcttctgctcctcgcagcctcggaggtggggagcggccagctccactactccgtctctgaggaggccaagcatggcaccttcgtgggccgcatcgcgcaggacctggggctggagctggcggagctggtgccgcgcctgttccgggtggcgtccaaaagacacggggaccttctggaggtaaatctgcagaatggcattttgtttgtgaattctcggatagaccgcgaggaactgtgcgggcggagcgcggagtgcagcatccacctggaggtgatcgtggacaggccgctgcaggttttccatgtggaggtggaagtgaaggacattaatgacaacgcgccagtttttccaatggctgtaaagaatctgtttatttccgaatcccgacagcctggctctcggttttcgctagagggcgcatcagatgcagatatcggaacaaattcgttgttgacttacagtcttgattccactgaatattttaccttggacgttaaaagaaatgatgaggaaattaaatcccttggactcgtgttgaaaaaaaatttaaatcgagaggacactcctaagcattatttactaataacagcaattgatggtgggaaaccagagctcactggcacgactcaactaaagatcactgttttagatgtaaacgacaacgccccagcgtttgagaggacgatctataaagtcagattactcgaaaatgcaccaaatggtaccctagtggtgaccgttaacgccaccgatttggatgaaggagtaaataaggatatcgcgtattctttcaatacggacatgtcagcagatattctgtcaaaattccatttagatccagtcaatggacaaatcagtgtaaagggtaacatagatttcgaggaaagtaagtcatatgaaatccaggtagaagccacggataaaggaaatcccccaatgtcagatcactgcacagttctactcgaaattgtggacatcaatgataatgtacctgagttagttattcaatcactatctttacctgtattagaagactctccacttagcacagtcatcgctctgatcagcgtgtccgaccgcgactcaggagtcaatggacaggtcacctgctcgctgacgccccacgtccccttcaagctggtgtccaccttcaagaattactactcattggtgctggacagccctctggaccgcgagagcgtgtcggcctatgagctggtggtgactgctcgggacgggggctcgccttcactgtgggccacggccagcgtgtccgtggaggtggccgacgtgaacgacaatgcgccggcattctcgcagtccgagtacacggtgttcgtgaaggagaacaacccgccgggctgccacatcttcacggtgtctgcgcgggacgcggacgcgcaggagaacgccctggtgtcctactcgctggtggaacggcgggtgggggagcgcgcgctgtcgagctacgtgtcggtacacgcggagagcggcaaggtgtacgcgctgcagccgctggaccacgaggagctagagctgctgcagttccaggtgagtgcgcgcgatgcgggcgtgccgcctctgggcagcaacgtgacgctgcaggtgttcgtgctggacgagaacgacaacgcgccggcactgctgatgcctcgggtgggtggcatcggtggcgcagtgagcgagctggtgccgcggtcagtgggtgcgggccacgtggtagcgaaggtgcgcgcagtggatgcagactcaggctacaacgcgtggctttcgtatgagctgcagcctgggaccggcggtgcgcgcatcccgtttcgcgtggggctgtacacgggagagatcagcacgacccgtgccctggacgaggtggacgccccgcgccatcgcctactggtgctggtgaaggaccacggtgaaccctcattgaccgccacggccactgtgctggtgtcgctggtggagagtggccaggcacccaaggcctcgtcccaggcgtccgctggcgccacgggcccggaagctgcactggtggatgtcaacgtgtacttgatcgtcgccatctgcgcggtgtccagtctgttggtgctcacactgctgctatatactgctctgcggtgctccgcgccgccaaccgaaggcgactgtgggccgggcaagcccacgctggtgtgctccagcgcggtggggagctggtcatactcgcagcagaggcagcagagggtgtgctctggagaggggttgcccaagaccgacctcatggcttttagccctagccttcctccttgtccaattagccgggatagagaggagaaacaggatgtggacgttgatctctcagccaaagtgagtaatttttatttattctttccaaaatgtctttgtttttcattcctcaatgtttccactcctctggaaatacattaatagttaagtatgaattatgtgattcataattagacttttccagttttgtggttttgtggttaaaacggtaagatttttgttgctaatttttgaaccaaatcagcagtaagttatgatatccacacttgtaattttgttttgttattaggtgcagtagtagaattattttattgctaaatgcctgggtataagacaaatattttttcttagatgaattgcattatttagagaatctgacttcgacttgttttatacttatccctatacaatgcttcttcaatatcttttgccacttttcatttggacttcctactacctgttagtacaaatgttacttgctcattttatgagttcacctaatgcttataactccctattgattatgcttttccaccttcagtttcaaaaattagatcattacacctgttgtcttttatggaacctcttttattctcttattcacttgtttggagtctcaatccttattttttacttgaatatgattcattttaggccttgtgctctaatttggcaataccgtttattgtttcttgatttcccagttgggaaaaaaatcgagaataacaattgcatttagaattgcatctttgttcatctttagtttatcactactttatttaatactactttaataatactactgtattatatgttaaaatttattactaataactaaaatatcaatatgaagtgaaaatttaatagttgtatagtatatttatatattcattttaaaagaatgttttaaatcttgttaaaaataattttcaatctgaacaatatcttgaaaataattatggtatctaattttaaaactatccctactagcaaaactttttattcattagtgtcttttgcataccatactaaggatgctaatatgaaataagtttgataagccaatgttataatgttattactggttaacttctctgaatagcatcctgcctattaatgtgtgccatgcaataagtagaaaactccaaataaccagaaccaaatgaaattgaaggtagacttttttctaatcactacccctacatatttggttatctcctctagcaattagttggactcccatttaagtttccctaccactggagagaaatagtaaccaactgaaacctggttaatactcattgacagtgtgggaggtctaacacgtaaaatagatatttttcttgactcctctccttcccctcacttccattttctttatttccttttttggcactatcctttgttgctcccttgtccatgaagtagtagccatagtgtgtccatctcaggtcagtattttaaaaatttagttctgttatcagcttcttgaatataatagagtcagccaaagtacttgtcttcccagatatggaacttcaatcttcaaatccagcttgcctcttgaaactattgtctaacaagactcttggcaaagacattttgaagactttggaattttcacttcacagatgtactgatgctatgccaaataaatattgaatagctaccaaataaacattgttttctattctgctgcattccccatctgtacattaaaatacctggtaaatgaaaatattacaaatgaaatgggtgaaaatggaattcttcctccttttttccaatgtgcttgatgtcaatgatcattttgtaaaaatatagtttgggtccccacatagtgaaagtactctggtttctgtttgattcagaaatttggtgggttttttgttgttgttttggtttttgtgtgtgtgtgtttgtgtgagtgtagttcttcaatagagagggagcgtaaagctattttcactagattgattttttgtttagacaaacaggatgaaaataactttatggatataggaggcaaggaaagtttttaaatggctaccattatgtctttatatattaaatttctttatgtaagaaaatgtattgtggtttatttattgggaagtcttcattccccattaatacccaggatgattcaaagatcatgattaccaagaattagaataaaaattaagctaaaacccaagttttcaacattgaacttgaaatacatcttaattggggaaatgtctagagactttttttgtatctttagaaaatcatagaggctattgaaacaccacattttcccaactagatatgcgatcaccttaaattaatgcattttattaggcaatggaaggaagcaaacattttctgcagggtaaatatttaggaaatattaggtaagtccctctgagctattaaacaattaagatacaactattccctttaaaatatatattccaaaaaaggacacacatactcaaatgcttataagagataaattaatgtaataaatggcccacgcgattccaccctggtgctgcagtttgtaaaagaagaaaaaatacctgttcaattggtttgatcatgacattcttcatgggtcagggaagttttaagtggttataaaatggggtaaattggctttagaagagtttagaaatgatgtggattacttatagacaggacaaaatgaacatgcttgtttattaaaaaaagctattggaagcaggaaatattcagtttggctaaaatatataagcactataggagaaaatagaagcttaggcacattacatactggagaacaagcaagtacttataaactgtaagagtcaaaatgagaataccagcgtttctcatgggagcaaatgagttccaatgaataaaattatttggaatgcttttccatgcaagctatttgctataacttcctgcttccttgcactttcagccctgacatgactcaaggaagacatctaattaaatgctgatggtctttgatccttttataaaacatctgcaaatttccctgtcaatagcttgttcttggcaccagaagttccctagagaccagtcccctcaagtcaacaacaccagaaatactagggtgaagagggtgttatcattaataaaaaaaaaccctggaattcttgggaacacaggaatctgtaatgaatttttctaatcaacagtttacagttacatgtttacaaagtgtatagttaggtctctgtaatacttaaaacctgtgttgaaaaaattatttctactgaagtaaaagttgcccctatggcgaaactaaggaccacactcaatcaatcagtggtacaatgtgtaccacagtagtacaaaatgtattcctattctccgaaacgactgaaataataaataaaaccaagtagtttacagtagagtgtgtgggggtttccacaattgctacttacggtttggagccacatgatgtcgctctttaccacaaaatacatgagagaaggaggaagaagggaaaattccttctattcttactggaaggaaccatatacactctttggagtctgaaatatggaggatgcagctgcacttgactgaccgattaaaagatttcccttgactttgagaaacgatatttaatcagaacaaaatactgtgcactaaagatggagttttcctggggaagcggccaggaatcccggcgtctgctgctcttacttcttctcctcgcagcctgggaggcagggaacggtcagctccactactcggtctccgaggaggccaaacacggcaccttcgtgggccgcatcgcgcaggacctgggactggagctggcggagctggtgccgcgcctgttccgggtggcgtccaagggccgcggaggccttctggaggtaaatctgcagaatggcattttgtttgtgaattctcggatcgaccgggaggagctgtgccggcggagcgcggagtgcagcatccacctggaggtgatcgtagacaggccgctgcaggttttccatgtggacgtggaggtgagggacattaacgataacccgccggtgttcccagcaacacaaaagaacctgtccatcgcggaatccaggccgcttgactctcggtttccactagagggcgcctcggatgcagatatcggggagaacgccctgctcacttacagactgagcccaaatgaatacttttctctggaaaaaccacctgatgacgagctggtaaaaggtcttgggcttatattacggaaatctttagacagagaagaagctccggagatttttttagtgctcacagccactgatggaggcaaacccgagttgactggcaccgttcagttactcatcacagtactggatgccaatgacaatgccccagcttttgacagaaccatttataaggtgagattactagaaaatgttcctaatggaacattggtaattaaacttaacgcctcagatttagacgaaggattgaatggggacattgtttattcattctcaaatgatatttcgccaaatgtgaaatccaagtttcacatagatccaattactggacaaattattgtaaagggatatattgactttgaagaaagcaaatcctatgaaattattgtagagggcattgataagggacagctcccactttctggccattgtagagttattgtggaagtagaagacaacaacgataatgtcccagatttggaattcaagtctttatcacttccaattagagaggacgctccactgggtacagtcatcgccctgatcagcgtgtccgacaaagacatgggtgtcaatgggctggtcacctgctccttgacgtcccacgtccccttcaagctggtgtccaccttcaagaattactactcgttggtgctggacagtgccctggaccgcgagagcgtgtcagcctatgagctggtggtgaccgcgcgagacgggggctcgccttcgctgtgggccacggccagtgtttctgtggaggtggctgatgtgaacgacaacgctccggcgttcgcgcagcccgagtacacagtgttcgtgaaggagaacaacccgccgggctgccacatcttcactgtgtctgcgtgggacgcggacgcgcaggagaacgcgctggtgtcctactcgctggtagagcggcgggtaggggagcgcgcgctgtcgagctacgtttcggtgcatgcggagagcggcaaggtgtacgcgctgcagccgctggaccacgaggagctagagctgctgcagtttcaggtgaccgctcgcgatgccggcgtgccacctctgggcagcaacgtgacgctgcaggtgttcgtgctggacgaaaacgacaacgcgccagcactgctagcgcctcgggcgggtggcactggtggcgcagtgagcgagctggtgccatggtcggtgggtgtgggccacgtggtggcaaaggtgcgcgcggtggatgctgactcgggctacaacgcgtggctttcgtacgagctgcagccggggactggtggcgcgcgcatcccgttccgcgtggggctgtacactggcgagatcagcacaacgcgtgccctggacgaaacggacgctccgcgccaccgcctactggtactggtgaaggaccacggcgagcccgcgctgacggccacggccactgtgctggtgtcacttgtggagagtggacaggcgccaaaggcctcctcacgggcgttggtgggcgctgtgggtcccgatgctgcgctggtggatgtcaacgtatacctgatcattgccatctgcgcggtgtccagccttttggtgctcacgctgctgctgtacaccgcgctgcggtgctctgcgctgcccaccgagggcgcgtgcgctccgggcaagcccacgctggtgtgctccagtgcggtggggagctggtcatactcgcagcagaggaggccgagggtgtgctctggtgagggcccacccaagaccgacctcatggccttcagccccagtttacctgactctagggacagagaagatcagctgcagacaactgaggaatcctttgcaaaggttagtgtataacatccttttgtttaattttcgtattgtttttctctatcaacttcttcgtaaatttatttctaagagtcaaatttccctgggttaaaattttacctctttttacatatccattttaactaaagtcttttggaattataggacatcagagcaatatatattgccttccttcattttatgctgcattattcaatgcatattaacagaactgtaatttctagtaaattttcactatattcaccctctttgtttttggtaataatcaacattttagaaaacattttactattatttaacctattacatataaacaaatgtgcacaggctgaaataataaagctccataaattgtatgaaagtgaaaagctccgttgcctccatcgctgaagcccctcgcatgcacctgccaaatcacttcccttatttttcctccagtgtaaccgcacatttgccttttataactgtttgttcggggcctgttttgggaacgttatctaattggacttgcacaacatgtattgtctgtgcatttgtgtgttatttgtatttatcactcattgtttatgaaattatccatgttgttatatgtagttgtagtttatttatttctgtttctagtactatttcataaatatactataccttatttattctactgttcaggaatttgcattgtgcctcaatgtctatttcaaataatgccatcataaatatattgtacatttctttgatgcccatgtacacagatttctctcaggtttttgcctaagagttgtgtttgtgggtcacagaatatgtgtgtatctttgtcttttgtagctaacaccaaccaattttccaagatgtttttacctgtttacattcctagtagtgcataaggctttctgctgggccacatcatctctacatttgtcaggttattttcatgttagccattttactgggtgacttttgtaatctcattttgaaattattttatatttaaatgaagttgagtacctttctattttattttggcaatttttataccttattttgtgcaatagctgctcaaatctcctatttctctagtctgttgtttttcttttcttttttctcttctttttgcttccatagaactttatttatttccttatcttgtttttcttattacttaaacaaatcttgtattctgaacataactcctttttttagtagttttcaacctcatggctagtttttaattcttttttgtcttttggtgaatagaaagtcataattttgattaaactcaatttatcaatttttgcttctgatcctatttcacaaagataattttctgtggtatcttttatttcattgtttacattacatctacaatccatttggaatatacatatttttatcattgttgtgaggtaggggtcaagatttatttttattccttcttattatttttattatactttaagttctaggatacatgtgcacaacgtgcaggtttgttacataggtatacatgtgtgccatgttcgtttgctgcacccatcaactcatcatttacattaggtatttctcctaatgctatccctcccccagtcccccacacctcaacaggccccagtgtgtgatgttccccaccctgtgtccaagtgctctcgttgttcaattcccacctatgagtgagaacatgcagtgtttggttttctgtgcttgtgatagtttgctcagaatgacggtttccagcttcatccatgtctctacaaaggacatgaactcacccttttttacggctgcatagtcttccatggtgtatatgtgtcacattttcttaatccggtctatcattgatggacatttgggttggttccaagtctttgctattgtgaatagtgtcgcaataaacatacatgtgcatgtgtctttatagtagcatgatttataatcctttagatatatacccagtaatgggtcaaatggtatttctagttccagatccttgaggaatcgccacactgtcttccacaatggttgaactagtttacactcccaccaacggtgtaaaagcgttactatttctccacatcctctccagcatgtgttgtttcctgactttttaatgattgccattctaactggtgtgagatggtatctcattgtggttttgatttgcatttctctgatgaccagtgatgatgggcattttttcatgtgtctgttggctgcataaatgtcttcttttgagaagtgtctgttcatatcctttgcccactttttgatagggttttttgtttttttcttgtaaatgtgtttaggttctttgtagattctggatattagccctttgtcagatgggtagattgcaaaaattttctcccattctgtaggttgcctgttcactctgattgtagtttcttttgaagatttattttttactaccatttttttgttggacttttaaaatgagtttggaagtgttccctctccttcaattttttttttttggaagagtttgaaaacaattatcattgattcttctttaaaagtttggtagaattctccaggaaagatatctggttttgggcttttgttgttgttgttgttaggaggtttggattactgattcaatctccttactagttacagctttgtttagattttttatgattatgtcttggtagtttgtatgtttctaggaattaatcaatttcttctaggttattgaattttttggtatatgattttaaaagcctcttataattgtggcatcaggtgtaatgccacctcttttgtttctgacttccagtctttttgtttttttcttagtctagctaaggggcttgtcagttttgttgttttttcaaaaaatcaactaagtttaaaaacttaatttaaactttttttcatttatttttgctctaatctttattatagtatttcctccctttgctttgggcttcctcatttgtcctttttttctagttccttgagttgttaagttttttatttgagatctttcttctttcttcatttttagtgtaggcatttacaactcccttctttgtttttgttttcatgtttaagagacaagatctcactatgatgtacagaggcacgatcatagctccctgcaagtgatccttgtgccttggattcccaaagcactgggattacaggcgtgagccactgagcttgcccagcttaatattccttcttagtactgcttttgttgtatcctgtaagtttttattgtgttgtgttttcatttttgtttatcttaacatattttctaattcatcttttgatttcccctttcattcaaatgaaattttgaacagaatttcgttcaaaattctgttgtttaatttctacatatttgcagattttccagttttaattccagtattgatttctagttttattccactgtggtcagaaaagatatttagtaggatttcaaccttcttgaatttgttaagacttgttttgtgacctgacgtgtgatttatcctggaaaatgctctgagtgtgcttgagaagactgtatatttgctgctgttgggtggaattttctgtatatgtctgttagttccatttcagctatagtgttgttcaagtcctctgcttccttgctgattttctgtctgaatgttctattccttattgaaagtaggataccaaaatctcctactacagtcattggagatacattctgagaattgtatcattctgagatttcatcactgtgcaaacatgagagtgtacttacatatttacacaaacctagatagtatagcctactacagacctaggttacatgatctattgcttctaggctacaaacctgtacatatgttaactgtactgaatactatagggaattgtaacacaatggtaagtatttgtatacctaaatatatctaaacatctaaaaggtacagtaaaaacattgtacagatttttaaaatggtacacctgaatagggtacttaccctatgaatggagactgcggggctggaaatttatctgcatgagtcaatgagtgaatggtgagtgaatgtgaaggcccaggacattactgtgcactaatgtagactttaaagcactatacatttaggctacactcaatttatcaaaaaattttctttttacaggctggtcatggtggctcatgcctgtaatcccagcactttgggaggctgaggaaggaggatcacttaagcccaggagttcaagaccagcctgggcaatatagtgagaccctgtctctagaaaataatttttaaaaattagctaggtgtggtgacacacacttgtagttccagctactcaggaggctgaagtgggaggatccttgacttgaggaggtcaaggctacagtgagctatggtcgtgccactgcactccagcctgagcaacagagtgagactctgtctcaattttttttctttcttcagtaataaattaaccttagcttactgtaacttttcaactttgtaaacttaaattttttaaccttttgactcttttgtaataacgcttagcttaaaacacaaacacattgtacagctgtacaaaaatattttctctttatatccttattttacaagtttttttgacttttaatttttttatttttttcacttttacttagtgtttttttttgttgttgttgttaaaaatgaagatataaacacccatactagcctaggactgtattgggtcaggatcatcaatatcattgtcttccacctccatatcttgtcccactggaaggtcttctggggcagttacacatgcgatgctatcatctcctatgataacaatatcttctagtggaatacttcccaaaagactttcctgaggctgttttgtggtgaccttttttcttttttttttttgagttaatgtattttttataagtagaaagagtacactgtaaaataccactaaaaagtatagtaaatacataaagcagtaacatttactatctgtatcaagtattatgtactgtaaattactgtacataattgtatgtgctatcttgtacttttatataactggtagtgcaataggtttgtttacaccaacatcaccacaaacatgtgagtaatgtgctacaacattatgactgctacatcatcactaggtgataggaatttttcagctccattataatcttatgggactactcttgtacatgtggtctgttattggttgaaacgttgttatacaacacttgactttattgtattgctatctatttctccatttctgtgaatgtttgcctcatatatttaggtgttttaatgttgggtgcatatgtatttataattgctatgtccttctggtgaattgaccttttatcattatataatgtccttctttgtctcttatgacactttttgacttaaagactattttgtgtgatgtagctgtttccacatttgcactcttttggttacaatttgcatgaaatttttttaatatcctttaactttcaggctatccaggtctttaaatctaaagcaaatctcttgtagttagcatataattgggtctttaaaaaaaatcaattcaaccactttgtatcttttgattgggggagtttatcccatttttatttaaagtaattattgatagggcataacttactgttgcctctttgttaattgttgtttgcagcttgtagactttttgctcctctttcctcctcttactgtcttcctttgtgttttattgagaattgtaatgctatgtttttgttcctttcctgttttcttttgtatatcttccataggtattttctttgtggttaccatggggcttacattttaaaactcttataaaaatgtattttaaactgatagcatctttactacaatcacaaaacaaaactcattatgtttacttctcccctacccaaattttatgttattgatgtcataaatacatctttttatattgtgtatacattattttatagttagtttttctgtacttttgtcttttaatcagattttaaaatatcagattttaaagtgacttttgtaccaccattacagtattatagtattctgtttttatctatatatttatctttactagtgagctttatactttaataaaatacctatgtatttctgtttagcatcccctaattttaactcaaaaggccccctcttaacatttcttgtaaggcaagtctaattgtgatcaccttcagcttttgtttaactgggaaggtctttatctctttttcatttttgaagacaaactttggtggatttggtattcttggctggcagttctttttcttttcagcactttcagtataacatctcacccctttctggatggcaaggtttctactgagaaatctactggtagagttaggggtgttcttttgtacgtgatgaggcatttttcttttgctgctttctaaattcttaacatttcttggatcttgatgtccatttccttcctcatatttgggaagttttcagatgtaattttaaaaaataagctgtctgtccttttctcttatggcttcttcttttgaaactgtcataatgagtagagcagcctgctcgaggatgtcctatcaatttcttaggctttctttactctctttcatttcttgctctttttgctactctgtctggataatttcaaatgatgtgtccttgagttcactgactcattcttctacttgattaagtctgctgttgaacatgtctgtaaaattttcagttcaattattgtattcttcagttccaaaatttctttttagttcttttgaatattttctatctgctgaaattctgattctgcttatgcattattttcctgagctcactgaacatctttatgacaattattttgaatactttgtcaagtaattcacatagctctatttctttaggtttggtttctggaggtgtgtttgtgtgtgtgtgtgtgtgtgtgtgtgggcacgcactatttgattgggccatgtttcctgttttctcatattccttattactttgtgttgatatctatacatttcaaaaaaacaaaaaacaacaacacaccagctacctcttccagtctttatggactggatttgtacatggaaagatctttactaatcaggctggctagagattctagggacctctcaaaccttttctgtggatgcatcttctatggacttgtgtgtataattcctaattagagggatctgccagcttttttttttaagatgctctaatctttttccctctgtggtgtctgtgtgctgtactgtgggccctctggagcagcagtattcactcagctcttttaggttctgagaagccctcagttatagattctgctgaatcctatcagtgcctggagtcaagtgagacagaaacttggactgcccactaaaattcaggaactttggatgcattttactctctctttccctcatgagagagagagtgctgagctgagtttctctctgtgtgctgtatcacaggtcctgaggagcatcagcccgccacccagctctttattattctgagctgccctcaggattttagaatatgccaggttccatcagtgctctgagatatgcaagacagctcccctgaaaagtcagaacactgaatgcatgctttactttctctttcccttctcagggagaagacaggagctgggaatttccccctgtttgaatggaactgtgctgctggatgggactatagggaaagtgccccagaaaagtgcccagctagttttacacttgcttggagcccaggaccctcttaactggtttcggcacttatcaccatgggaattggtccttgtattgttgttgagttggtatacctgtggagggtctggggattcctataacagcatcttgctgatgtcactacctctgttatctttttaagctatatatgcttttacaaattattttattgatttcctcttttgttgattataacacacatccttgacttattacctcaattaaatcaataattttaataattccaggcaacgctaagaccttgaatcattataccatttacttgtaccctactttttgttactgatatgcctttcaattatttatatgttctagacacacagtacattattatcattgttttgttaacacctatatatgtttctttctgggatcattttccttctgaagaaattaacatttcctttagtgtggcctgctggtaaagaaacctttacgtttttatatatctggaaatgtcttaattttactatcacttttgagaaacagttttgggtattgaatgaaagttatttttgccagcacttttaagatgacattccatggtcttcttttgagatgatggctgtcaagtttattgttcaattagtgtgtctttttttctgtctagctactttgtatacttactctgtttttcacttttaacagctttactatcatgtgcccagtgttaatttgctttgtttttaatctcgcttgcagttttcaaagcttcttatatctgtgggttgataatattttatcagtttaagagaagatttagcagtatgccttcaaatacggcttctacttcatattttctcttatattcttctgtgactataagtacatgtatgttaaatcttttcaccatattccttgtcttttatgtgccatttctgtttttaaatcactttttctctttgtttcataatccatgttttattctgacccatcttttactttaggaattttatcttgttattctaggccactgtcaaagtcattgattgaattcttaacttgaatcgtggcatttttccattttagaattttattttcctttttaaaaatatatttctaacttgggtactggctaatgtcaaaagaaactttcctcccacaaagttttcactcacttgatcttggattttaaaatcagatataacctgagagattatcatttttctccatttaataatgaatcaggccaggcatggtggctcatgcctataatcccaacacctgtgtgggccatgacaggaggattgcttgagcccaggagttcaagatgagcctgagcaatatagggagactccatctttacaaaaaatgaaaaaaattagctagatgtggtggtgcacacctgtggtcccagctacttgggaggctgaagttggaggatggcttgagcctgaggctgcaatgaactttgactgtaccactgcactccagcctcggtcagagtgagactctttgtcacccagttgtatagaatcaactataggtagaggcataaaaaagatgcctgagattgcatctcttgaatttagcttcattgtccctttctattaagtgagattatttgacatgaacattgatattcactatctcagggatatgttagaactattctcatattttctatccacagaggatatataatatggatattttagcacattcccttatagggcagttataccttcctctgtgactcattatacaggcagcgctaagatgtgtattatatgctcatggtatcctttcttactatccttataatagaataaattaatttttatacagaattaatttttgaagaatcaaatgacatatgtgcataaattatttatacatttttatacaattgcttcaacatttcctcttctctgcaatctggtatatctatataatttctatagataagagaagaaaaatatagcttattaaaattttattctgggttttgtaaggaataaaggacatttgtacccttatgaagattaaattttcttgtgttagtatatttctaaaggcttttagtgaattaaatggagacactttaatatactacacagttttaaatctaaatttttttctcaaggaagaacttctgtttacacaatgatgcttaaacatgactgaaatatctaaaggagaggttaactggatcagtcaagaaaataatctgtaacatttgattgaagaaaatagcttagaagaagattttttaaaatgttcttttcctgtggagtctcccatgaaattcagattggataatctatagttactgagaaaggaatattcaaaataagagttgatcactgtagcacaaatgcaagtgataatttaaaaagtaaatataatttaacagatatgaaagtgaatcaaaagtcaagagtcttgtttcctcctgaaatatctatataagtacatgagatattttttccagactgagaggagcatgtgaactgatattgttgatgactttttctccattgagtatatcttttaaaatactcagtatttatcataatactctgcagattacaatgtacacattgttaatactacattgttaatttgccttttaaatacttaatatttacttttttcaaaggttatctttgtgtattttgtataaaattctactataatttattccatagctttgtagttttacattatttactgttatataatagaaagtggctaacatcagctaatgctgttttctaaatatttattatcattttcttatgtttttaaccattgtgtattaaaatatttcaaaattatcagtatgaaaactattaggcaaatagtctgggaaattgatttgtgtttcaacgatccaaatattagtgaaaagtcatgataatagagatagtaaaaatcttataagggaactggtaaatatatctttaaagattgtatcagaaacaattctatgacaatatcttgtttctttacaagtttgaattccagaaatcaagtgaatttcctctgactttgcattttctggtaatttcttttttcttatcaagctatattttaaatgtaaaagtatccaacaatagaattgctaatctcttggtccctcttgtcttcacaggtaagggatattttgtaatatttaaggaattttatggagtatatatacaagcagaatgttagctatttcttcaatagaaaacttggtgatattttcttttgcccatatttattaagtgaagtttactaaattttctaggtcgtgttcaaatcataccatccagtaaacagttgggagattaaaaagtaattaaactaatataaagatagcctggttaataaaatgatattcttttcaacatgattatatttactggaacctaaacattttgtgaaatagtatgtcatatagacaatattaggattttgacttgttatgtaagtacaaaggtatgtattttacaatttttaataattgctttatcagtaatagcaacttgaagaaatgctatctagatgcttctaatttgaaaatagtgcaaagacgatttaccaaagtcgttctattatgcttttgatttctagaaagctgaaatatccccattacagtttttgagtcaatacaaaaagtagataggtgttatagataaagaaataggttttcatcgatttgaaaattagaactccgagaagaaactcaggtaagaatgccattaaaatagttttagttgtttttgaaaataacatcaacaaaatgtcactattaaacagtgaaattggaataaaaatttgttttatgagtaacacggagatagcatacaaacattccattgactaatacagaaaaaactcaaaagttttaattagatatgtttaaatagagatgagaaaagtcaaaactttaactcttaaaagttatttttatcagtttggaaatatataaactcctccctatataaaatacaccagcacaaatttctctagtaaggattggggtttcatgactttagatgtatttttctgtaatattttaatgacgcacttatattgacgcattttaagatagagtttaatgatatattttgactagagataagtgatttaaagaataagaatcatgtcattgaaagtgagaatacttgagaaatattgacgaatataagctaaataaagcaaaacaaaataaaacacttaccctttcatccacatgatgtcgctggacaccggaaggtttttctcccttcccagcctcaaaggaatacagtgagtagattttccttagacagaaaggaaaagaaccttccatttttggctgtgccaagaagctcagaaaggcgataatataaaaaatatatagttaattgggaattgaatttacaaaatacattgtgtggtgatgcaatagaaagctcataattggaacgagattgagatggtatattcccggagaggaagtctgggatcccggctcctgctgctctggcttctccttgcctactggaaggcagggagcggccagctccactactcgatcccggaggaagccaaacacggaaccttcgttggccgcatcgcgcaggacctagggctggagctggcggagctggtgccgcgcctgttccgggtggcgtccaagggccgcggggaccttctggaggtaaatctgcagaatggcattttgtttgtgaattctcggatcgaccgggaggagctgtgccggcggagggcggagtgcagcatccacctggaggtgatcgtggacaggccgctgcaggttttccatgtggaggtggcagtgaaggacatcaatgacaatccgcccaggttctccagacaagaacaaagattattcattttagagtcaagaatgccagattcgcggtttccgctagagggcgcgtcggatttggatattggagcaaatgcacaattgagatacaggttaaatccaaacgaatattttgacttagatgttaaaacaaatgaagaagaaacgaactttttagagctggttttgaggaaatccttagatagagaagaaacacaagaacaccgtttattagtgattgcaactgatggaggaaaacccgaactaacaggtacagttcagttgttgatcaatgtattggatgctaatgataacgccccagaatttgataaatccatttataatgtcagattgttggaaaatgcaccaagtgggacattagttattaaactgaacgcctcagatgcagatgagggcatcaataaggaaatagtgtatttctttagtaatcttgttcttgacgatgtaaagtccaaatttataattaattctaatactggtgaaataaaagttaacggggaactggattatgaagactataactcatatgaaattaatattgatgccatggataaaagtacattcccattatcaggacactgtaaagtagtagtgaaactcctggatgtgaatgataataccccagagatggccataaccacccttttcctgcctgtcaaagaggacgctccactcagcacggtcattgctctgatcagcgtgtctgaccgtgactcaggtgccaacgggcaggtgacctgctccctaatgccccacgttcccttcaagctggtgtccaccttcaagaattactactcgttggtgctggacagcgccctggaccgcgagagcgtgtcggtctatgagctggtggtgaccgcgcgggacgggggctcgccttcgctgtgggccaccgccagcgtgtctgtggaagtggccgacgtgaacgacaacgctccggcgttcgcgcagccccagtataccgtgttcgtgaaggagaacaacccgccaggctgccacatcttcacggtgtctgcacgggacgcggacgcgcaggagaacgccctggtgtcctactcgctggtggagcggcgggtgggcgagcgcccgctgtcgagttacgtttcggtgcacgcggagagcggcaaggtgtacgcgctgcagccgctggaccacgaggaagtggagctgctgcagttccaggtgagcgcgcgcgacgcgggcgtgccgcctctgggcagcaacgtgacgctgcaggtgttcgtgctggacgagaacgacaacgcgccggcgctgctggtgcctcgagtgggtggcaccggcggcgcagtgagcgagctggtgccgaggtcagtgggtgcgggccacgtggtggcgaaggtgcgcgcagtggaccctgattcgggctacaacgcttggctttcgtatgagctgcagccagcgcctggcagtgcgcgcatcccgttccgcgtggggctgtacacaggcgagatcagcacaacacgctctctggatgagaccgaagcaccgcgccaccgccttctggtgctggtgaaggaccatggagagcccccgctgacagccacagccacagtgctggtgtcgctggtggaaagtggccaggcgccgaaggcctcatcgcgggcgtcggcgggcgctgtgggtcccgaggctgccctggtggatgtcaacgtgtacctgatcatcgccatctgtgcggtgtccagcctgctggtgctcacgctgctgctgtacaccgcgctgcggtgctcggcgcagcccaccgaggccgtgtgcacacggggcaagcccactctgttgtgctccagcgcggtggggagctggtcgtactcgcagcagaggagacagagggtgtgctctggggaagctccacccaaaacagacctcatggccttcagtccaagccttcctcagggtcccacctctacagacaacgtgagttttctaatattaacatccatctttccctcccaattttcaaatattaaatgtcacattcacccactttttttgtatttaaaaattatgtcttagtacacaaatattgtggtacacaattattgcactaattcatgtattatatgctttttatgaggcttttctgctggggtaatagattcatcagctttctgtgatattaagtgtttttaaaataatattttatattagcatttgaattttgcatctctaaaaatgtaggataataattgtaagacatagtttggagtcattctcaaagtttcagtttatgactacatgaaaatttattttattttattgttattttttagagaccctttgttgcttagtctgcagtgatctgatcatagctcaccgaagcctgaaactcctgggctcaagtgatcctcctatctcagccgcccaagtagctggactacatgcacatgctaattaaagttttttttttttttttttttttattttctgtagagataggggtcttgctactttgcccaggctggtcttgaactcctggtttgaagccatgctcccgtctcagcctcccgaagtactaagattacaggattgagcaagagtgcctggcctataaaaatgttttaacaccacccttccaattttgcctttttgtttctattgaatttaaattaattattattttattacactaatttagtttgttttcaattgtatttttgcagcatatggtttatttcaactttgcctaagcagttcacctgtatacccatgatgaatttgataattgtaatttaaaaattatatttttcattttattgattttttgaataggaaacacatatacatggtttactgttctaaaggtgcaaaagaatacagttaaattttccctttcacctccttcatgaagccaaaacattctctggtatccttctagagatttttttcatatacaaataaacttccctacccccttaaaaaacatatgagtattgattttaatcttgcttttttcatttactaatgtatcttgatgatcatgaattatcattactgaagtagatttgtttttcttttatctggatctatggtgttccattgtgtaggtatgtgattggttatttttcccttaacattaacatttagtggaacaatgatttaattttctggaaatttgcatatttttcaatatatctaatatatattagatatataaatatctaaaatatctaatatatatctaatatattatatattttatataatatatataataaatatataataataatatatatcagatattttgatacagaattttgctcttgttgcccaaacgagtgcaatggtacaatcttggcctcccaggttcaagcgattctcctgccttatcttcccaagtagctgggattacaggcatgtgcccacacctggctaattttttgtatttactagagacggggtttcaccatgttggtcatggtggtctcgaactcctaatctcaggtgatttacccgcctcggcctcccaaagtgctgggattgcaggcatgagccatcgcgcctggcctaaattattatattgatgaggagtaactgtgaatctcctcagttgtgcaaattctactatattttggttgggaaattttactgcttgttgttacttttagattaaaaaaataaatataccatgatacaaactcccctcttgagttgtttacaaagagttgtttattaaagctgtatgtttgagactacgctagacaggtgtcctctccatctgaaataatgagaaccatttgtctactcttttgaggggaaaagtatggatttataggtagtaaatagtccacactttacatgataaaatgtgaattccctatttctgttgctttgcctgtttcttttattctcatatgcattcaattttataagtacccttctatcatgctatttatatattcctaatatcctgagctactttgaggaagtcctagaaattgagaaatagtttttgtcattctataaatctaaagttaacaatggtcacattttaaaaaatcaagttttgtgatataaactatttatatatctctttatatatcaagtctttatgtatattttgtgcagcttgtcttttttataggaacctcttgttttggggattgtttttggttaagaaattgaaccctttgtttgcccaaaataactgcaatagaaagtcagtgataagaactactaaatagatccaggttaattattttaagatagaatttcacatggaagaaaaggctttgtgtcacaatcatctgtgaggcattttactgtatatcagaattttggagtaaggtgaagatgatcatgtcatttgaaaagtcttattggtgactctatttttctcctttgaaggaggggtttaatcacttcaaatggataacattaaggttaaattaagggcgaagttgatatttggccctgacttttatatgaaggtaacatttttgcaagtaaattgtagacgtaattaaaaaaacccagctaaaacaaaggtggtattgagaaagaggaagagcaagtggtctatattgtcagaaaaataagattcatattggagagtaattgaaaataacctgcaaaaagttgattacctaacatgtgattacatattaggttactagaagtttctcaagtgtcttgcaatttctaggtttagtaaaattcaatgaaagctgtactcataaagataaatatgatagcatgtgaaagacagatggacttaggtggatgtggaataaggcaagccagggaaaaggagtaatttaaaaagtaatataggtgacatgggaaatgctcatgtcattaaaaatatgaatttaaaaatttgaatttggggattattaataattgctcatgccttgctatttaacaaactattttctaggagtcagcatgtataggtgaaagtgacaattagaaacatagaaagaagggatgcagatatggatttgtaaatacctcaataaaagtcttattcaaaacttggaagtgagtgagaacaattaaaggaaaggatatgggacagggttgaagttgagagagaaaaacgagatcatttaggaacagctgaagaatcaaaaacagcaaagcacaatgggtagaaattccactagaatttgaagtggtgaagtatatgaaaagaaaatattttaagcaagaatcctaatataagctgcagataaattaaatgtgataaagaatatgctctagaattttatcttccatcattacacagaagaaccttaagagcatctgatatttattgaacaaagaaagcatggacttcaataatctataaggctttaaaaattcaaccaaaatttgataattttaagttacattttttccctagagcactatataatagcatgtcctaggaaagacagatgtgggcaagtttcttttctaccaagagtgtagaatagtttacatttctgatttaaaaagcagttccgttaacacttaaatttgctgaactggttgatattaatgttgcaaatattggtagaaaagttgtttagctgtgaataattagatcccttactttaaattaataaaagaagtcgggataacactgaccgtgcaaattacaaacgtgaggagggtttactataaaagtagagaaaagaagatactgttttaaaaatatatggtatagcactgttacgtgaattgatttcttaccttttggagccgcatgatgtcgctgtctaccatgaagttatagctagccaacattcaaatttcttctattactgcatcattccctgactgttgaatgatggcggacgcagaagaaatggattaataaattccggaacatacagtattttatctttatgcggaagatcttctaatggaaataaaaccagaggtatttgacatggtgtttaccccggaggatagattgggaaagcaatgtctgctcctcccgcttctgctcctcgcagcctggaaggtggggagcggccagctccactactccgtacccgaggaggccaaacacggcaccttcgtgggccggatcgcgcaggacctggggctggagctggcggagctggtgccgcgcctgttcaggatggcctccaaagaccgcgaggaccttctggaggtaaatctgcagaatggcattttgtttgtgaattctcggatcgaccgcgaggagctgtgcgggcggagcgcggagtgcagcatccacctggaggtgatcgtggacaggccgctgcaggttttccatgtggacgtggaggtgagggacattaacgacaacccgcccttgttcccggtagaggaacaaagagtgctgatttacgaatctaggctgccagattctgtgtttccactggagggcgcgtccgatgcagatgttggctcaaattccatcttaacctataaactcagttctagcgaatacttcgggctagatgtgaaaataaacagtgatgacaataaacaaattgggctcttattaaagaaatccttggacagagaggaagctcctgcacacaacttattcctgacagccacagatgggggcaaacctgagctcacaggcactgttcagctgctggtcacagtgctggatgtgaatgataatgctcccactttcgaacagtctgaatacgaagtaagaatattcgaaaatgcagacaacggaacaacagttatcagactgaatgcttctgatcgggatgaaggagcgaatggggcaatttcatattcttttaatagccttgttgcagccatggttattgaccactttagcatagatcgaaatacgggagaaatagtgattcggggtaatttggattttgaacaagaaaacttatacaaaatcctcattgacgccacggacaaaggccatcctcccatggcgggtcattgcaccgttttagtgagaattttggataaaaatgataacgtccctgagatagcactgacttccttatccttgcctgtacgtgaagacgctcaatttggtactgtcatcgccctaattagcgtgaacgacctcgattcaggtgccaacgggcaggtgaactgctcgctgacgcctcacgtccctttcaagctggtgtccaccttcaagaattactactcgttggtgctggacagtgccctggaccgcgagagcgtgtcggcctatgagttggtggtaaccgcgcgggacgggggctcgccttcgctgtgggccaccgccagcttgtctgtggaggtggccgacatgaatgacaatgctccggcgttcgcgcagcccgagtacacagtgttcgtgaaggagaacaacccgccgggctgccacatcttcacggtgtctgcgcgagacgcggacgcgcaggagaacgcgctggtgtcctactcgctggtggagcggcgggtgggcgagcgcgcgttgtcgagctacatttcggtgcacgcggagagcggcaaggtgtacgcgctgcagccgctggaccacgaggagctagagctgctgcagtttcaggtgagcgcgcgcgacgcgggcgtgccgcctctgggcagcaacgtgacgctgcaggtgttcgtgctggacgagaacgacaacgcgccggcgctgctggcgcctcgggtgggtggtactggtggtgcagtgagcgagctggtgccgcggtcactgggtgcaggccaagtggtggcgaaggtgcgcgcagttgacgccgactcaggctacaacgcgtggctttcgtatgagctgcagcccccggcaagcagcgctcgcttcccgtttcgcgtggggctgtacacgggcgagatcagcaccactcgtgtcctggacgaagcggactctccgcgccaccggctgctggtgctggtgaaagaccacggtgagccggcgctgacagcgacggccacggttctggtgtcgctggtggagagtggccaggctccaaaggcgtcatcacgggcgtcggtgggcgccgcgggcccagaggcggcgctggtggatgtcaacgtgtacctgatcatcgccatctgcgcggtatccagcctgctggtcctcacgctactgctgtacacagcgctgcggtgctcggcgccacccaccgagggcgcgtgcacggcggacaagcccacgctggtgtgctccagcgcagtggggagctggtcgtactcgcagcagaggcggcagagggtgtgctccggggagggcccacccaagatggatctcatggcctttagccccagcctttcaccttgtcctattatgatgggtaaggcggagaatcaggatttaaatgaagatcatgatgccaaagtaagtgaattttcataattaacagttaatttttattttaaatttataattgttttcctcatatttgtcttctatatttctgtttttaatttttaattaattttacaaaattacatattttcattttattgtgtttcttattttaatctctttgcttctttaatattcataatttaagtgaaattagaaatcactgtccacaatctgcacctcagaatttttgtcttcaaaccaaaatattcttggatatgtcgttttctgttgcattttaattcagaatcatagtagcatttttttctgattaattatatgggattttcatttgtttgcctttgagctttaggataatttttttacatatactcttttttgatcatatattgaaatttgagcaccagtgtatcacttatgtttttacactttccatttcaatgtttttctgtcgacacttttattaagctaacgctttgattttatccattttgtgtaagaactctgatcatcatagtttttatctgtggttcccttttcagacttgtgattccgggaggcaatagtgttcatttattgtcccccttttaaaccattgaggaataaaggacaaaaacaatagttatcagcctgaatacttctggttgttatggttattgatttatttactaccgatctaaataatggaaaaatagtgattcaacagaatttagaccttgtgatcaagtaaatttatatgaaaactgcattcctctggcattgcggctctcttatttctgtttgaatttcacttgatggtcttctcttcatggagtctaaatctatttctttgtattagtgttttcattgtttctacacagtaatttaaactattcactattttgtatgtgtgtgtgtgtgtgtgacagggtcttgctctgtcacccatgctggagtacagtggtgcaataatggctcactgcaccctcgaatgcctgggctcaagtgattctctcacctcagcctctggagttactacacacgagcaccaccatgccccccaccttttttttttttttttttttttttaagagatggggtttctccatgttgcccaggctggtctcaaactactgggtgcaagtgatctgcccaccttggcctcccaaagtactaagattataggtgtgagccactatgcttggctagtcattatttctttgaatgaaaagcagcaaaaagtagtgattaagtgtgagttttggtgttatcctcccttgcctaaatttcatcgctaccaattttgttttgtggatggattgtttcacctctatttcagtttcttctgtaaagttggaatgataaacactagtttcaatgatagaattgtcataaagctttagtaagttgatattgtaaggcgcttataactgtgtttgccaaatagcaagtgcttaaaaaatttgctactagttttccgaagaggaaaagaaaaactttatgtcattttatgctaggaaactctcattacggattccatattgttttcattttacgtaaagattgaatttttgttattcatagtgaggccataattaccaatttaatctgagatgtctctaacattttaaatgccatgttctacattaaaagcaatttaaaatgtgtgtttcaaagttgaaaattgaattaagacttggacagtggaaaagttttatgaattcaaaagacatttaacctgctgagtcctcagtgatttcctggagttggttttgactttttgtgttgtccatgttcccaggaaatattagactacattaagcatgaatggtgtatttgcccacatttaaaagttgcttaagggccattagaggactgagttgtggtttgtgtttcctaatgtgagcattttccattcttgaaatggcagaaactggtagtggtattttctgttttctaaaagaagtacatgataatttttaagcgtgtaattaatattgcactaaaatttaaaaaaactaactctacatacttaagagtggcagaattgtctctgattatactgaagatcaccatttgtgtagctaatgatatctaacagcctcaaaacagcatactttcttaggaagtagagaactatagcgttgctagtgagtaaatgttttttaaaaagttcctaggagggtctttaagagtatcacactgtgcctgctgagaatcatcgaattaacaagacctggcttcaaatttaatagataaataaaggtaagtatcctacataaatacgatgatagtaaaagcaagaatattgtaagaggtgctagaaaggtacatcatagtgttattggaattggaaaaaaatctttgcctttttcccttgttgaaggagaccgtgaagagtcatgatgttttactggttataaaatggaaagagttttccctgggagaatatggagactaacaggtattcatgagaagagagtaacttaagtgagtatacagaaaattccaaatgtacctagaaatgaggaatagtccactttgggtaaagcacatggttcccataagagagagtgtgatataaagcaagaaaagtaatatgagaaaaaccttttgtataactttgagtactagacgagtaattttgacactcttcaaagtcatttgaaagctgtcaaaaagtgtgaagcaatacgaataaaaagtattaacggaagatgactgcaaggattaaatgaaggagaatgaaataggaatggacaggttacacaataagaagctactgcaatacaccaggagagcagcaattataaaaacttatttaggaaagcatctgaatacagacataattattttacatgccattgggaacattggagtgaaacattccagaaaacgaacacagtaaggtagatccaaaaaggatgaaatacctcaagacttgatcaaagggctgctgtatgtgagatggctgagcactgaaatttatctaataaaataaacttacattttaaaagaaataatacaaatcatatttgagattgtaaaaataggcatatattcataacacacaagtgttcgaaaggatagaatgaggaaacaaatataaaatgatgaactcctgaaacagtatatatagattctgctaaagcaaaaaattcagaatacttcctcctcaaaaagttcacatgatacaaattcttccccttcaaagattccccaaaccttctcttattttgttttcccaagagaagtgtctggatagttgctaatgtttcttgcctcctaaaaagaaaacacacacacacacaccgctttctaagtttctctttcatcaatcagtagattcttgagatcctgggtccctaaaagagtacaggatttttcttaacaagcgatactgaatcaagaatatgaagtttcctgggatctagatcaaaggaatttaaacttgcagttgtttaaattcatgttgtcacttaggtttctatctttatttaaaactgtgtgaaaaaaaagtttttctaaggcatgaggaagctacagttctggtaacactgagtattcaaaagccatcagtcgcctaagaatgcttctaacaatcatgagaaatgctattttaacctttaacaacaatgaagaaaaaaattcagagtttgaaataaaacttttcatctgattaatagtttgtaatggtttgtaattcttacttacatgatggccacatgatgtcgctctttaccgcaaattctttcgtaatcagcaaaaggaagtcattccttttcgcactggaaagacgctccactctctttcactctttggatgcacaacaatggccacacatcgagattgaaatgaagggataaaaacattcctataaattcgaaggcaagttttgctgactagaaaaacaagccaataatttgaaatggtgtgcccgaatggatacgacccagggggccgacatctactgctgtttattataattctagcagcttgggaggcagggagaggccagctccactactcggtccccgaggaggctaaacatggcaacttcgtgggccgcatcgcgcaggacctggggctggagctggcggagctggtgccgcgcctgttccgggcggtgtgcaaattccgtggggatcttctggaggtaaatctgcagaatggcattttgtttgtgaattctcggatcgaccgcgaggagctgtgcgggcggagcgcggagtgcagcatccacctggaggtgatcgtggaaaggccgctgcaggttttccatgtggacgtggaggtgaaggacattaacgacaaccctccggtgttcccagcgacacaaaggaatctgttcatcgcggaatccaggccgcttgactctcggtttccactagagggcgcgtccgatgcagatatcggggagaacgccctgctcacttacagactgagccccaatgagtatttcttcctggacgtgccaaccagcaaccagcaggtaaaacctcttggacttgtattacggaaacttttagacagagaagaaactccggagcttcatttattgctcacggccaccgatggaggcaaacccgagctgactggcaccgttcaattactcatcacggtactggacaacaatgacaatgccccagtgttcgacagaaccctgtatacggtgaaattaccagaaaacgtttctatcggaacgctggtgattcaccccaatgcctcagatttagacgaaggcttgaatggggatattatttactccttctccagtgatgtttctccagatataaaatccaagttccacatggaccccttaagtggggcaatcacagtgataggacatatggattttgaagaaagtagagcacacaagatcccagtcgaggctgtcgataaaggcttcccacccctggctggtcattgtacagttcttgtggaagttgtggatgtaaatgacaatgctccacagttgactctcacttccctgtctctccctattccagaggacgcccaaccaggtaccgtcatcacattgattagcgtgtttgaccgagattttggagtcaacggacaggttacctgctccctgacgccccgcgttcccttcaagttggtgtccaccttcaagaattactattcattggtgctggacagcgctctggaccgcgagagtgtgtccgcctatgagctggtggttaccgcgcgggacgggggctcgccttctctgtgggccactgctagcgtgtccgtggaggtggccgacgtgaacgacaacgccccggcgttcgcgcagcccgagtatacggtgttcgtgaaggagaacaacccgccgggctgccacatcttcactgtgtcggcgggggacgcggacgcgcagaagaacgcgctggtgtcctactcgctggtggagctgcgggtgggcgagcgcgcgctgtcgagctacgtgtcagtgcacgcggagagcggcaaggtgtacgcgctgcagccgttggaccacgaggagctggagctgttgcagttccaggtgagcgcgcgcgatgcgggcgtgccgcctctgggcagcaacgtgacgctgcaggtgttcgtgctggacgagaacgacaacgcgccggcactgctggcgcctcgggtgggtggcactggtggcgcagtgagagagcttgtgccgcggtctgtgggcgcgggccatgtggtggcgaaggtacgtgcagttgacgctgactcaggctacaacgcgtggctttcgtatgagttgcaaccggtggcggccggtgcgagcatcccgttccgcgtggggctgtacactggtgagatcagcacgacacgagccctagatgagacggacgcaccgcgccaccgccttctggtgcttgtgaaggaccacggggagccctcgctgacagccacagccaccgtgctggtgtcgctggtggaaagcggccaggcaccaaaggcgtcgtcgcgggcatcgttgggcattgcaggcccagagaccgagctggtggatgtcaacgtgtacctgatcatcgccatctgcgcggtgtccagtctgttggtgcttaccctgctgctgtacacggcgttgcggtgctcagcgccgtcctctgagggcgcatgtagtttggtaaagcccactctggtgtgctccagcgcggtggggagctggtcattctcccagcagaggcggcagagggtgtgctctggggagggcccacccaagacagacctcatggccttcagtcccagccttcctcagggtccatcctctacagacaatgtgagtcataaataatcttgtttccaacaattttaaaacaattagttcaattggtctccttaaattttctttcataatttcttttttagttgatagctttatgtataattattattttttaatgttatgctgtatttgcactaattatttggaagtacgtttaatatacacttttgttttgggatgcgtaatactatagatcaaaatctatggtttatgttggctactctccatttttggaggaggactttgctaactggagcaatggattcacctttcttctatagtgtatttacaaaatcaaatatttacatttccatattttgataatcaatacctataaatgttatagtaaacaaatttaatatatatgttacctaatattttattctatgtattgtcctcattttataaaatatagctgtgtcaaaatcatctgttcaattttgcctttttatctttagtctagaacttgaattttaagcatttcttttacatctatttatcttctttttatcatatttgtgtagcactgacttctttttaacttactttgttgagatgtatttgccatgttcatgaagaattaatatgaacaatttaaaatagtttaaatggcagtttaatagtattttttattttgttccttgtttgtataagaaatatattcacattcaaaatttcaaagagtgaaatctagtacgtagtaaaaaatctccttgcctcctcaaaccccaaaccatttactttacctttctgaatttctgaagcagtttactttttttgtatattcccaagattattattgccaaattatataaatatatttacaatcaccaaattgtaaatcgccaatatatatattttataatttgccccttccttccttccttcctttctttctttctttcttcctttttctttcattctttttcttttttctttcttctttcaagacacgctctcactccatcacccaggctgctgaaatgcagtggtgggattatagcccactgcaacctgaaagtcctgggctcacaggatcctcccatctcagcctctggagtagctgggaatacagtttgcatgtcattgtgcctggctaattttattttatttttgtagagacagggtggagtcttgtttcccaggctggtcttgaactcctggcttcaagcgatcctcctaccttggcctcccaaagtattgggattacagacacgaacaaccacacccagcctgcctttcatctttccttttttttaaaaaaagaagtgattacagtagaaacctacctttctgcactttttggttttccactttaagttatatatatatagtgtgtgtgtgtgtgtgtgtgtgtgtgtgtgtgtgtgtgtgtgtgtgtgtgtgtttgacagagttttactctgtcgccctctctggagtgcagtggtgcaatctcagctcactgcaaaatccgcctctctggtacaagcagttctcatgcctcagtctcccaagtagctgggattaaagacgccaacaaccaagccatgctaatttttttttttttttgtatttttagtagaaacagagtttcaccatgttgccccggctggtctcgaaatctgggactcaagtgatctgactgcctcagcctcccaatgtgctgggattacaggagtgagccaccgcatccggcctaaattatatattgggttttgtggcatattatttcattagcgcttattccttgtttttgattatttgctttcttatttttaaaagtatttgcatcttattttcttttatggatatatcatgatttattcatccagtactgtattagggacattaatgaaacaataaccgaattgtctagacttttaaaaattttttacaaataatttggttggtcaaaaaaatgatagttaacggggcatggtggcacacacctttaaccccaacatttcgggaggccgaggcaggaggattgcttcagtctagtagtttgagaccagcttgtgcatcttttgtagagactttgtaaaattagctatgcatggtgatgcatgtctgtagtttcagctactcaagaaactgaggtgggaggatcacttaagccagggaggtccaagctgcagttatcatgccactgaactccagcctaggtgacagagcaataccttgcctcaaaaataaaataaaatgaaataataaaataaaataaaataaaaacccagaactgacaattttcactgttcctaatattctaatatactttagtaaattattttaggatatgttactgttttcttttcaacgtgaataaggatagaggtatgcaaagtcaaaaacctgtctgataatcaatagaattatttaccattaagccataatatgtcattcacataagcagaccaagtttgctgctcttgttgaaagatattcagttttgtggaaaaatctataaatatctttgaccttcaaagatgtaactgtaatctgtttttattgctttgcttttatgcttacatgcatgtatatttaaaaccttcctagcatattattaaagttttaaatatcctatttatattgggaaatacctgaagttgataggggatcctccttagccacctaagctgtattcatcaattattatgatgatgatgatgattattatttttgagacagggtctcactctgtagcccagactgcagtgcagtggcacaatctgggcttactgcaatctctgcctcctgggctcaagtgatcttcctacctcagcctctcaagttgctgggactataggcacacaccaccatgcccaactaatttttgtattttttgtagagatggggtcttaccatgttgcccaggctggtctcaaactcctgagatatcgagaaatactattttctttacaaattgtttgctactatttagagtcaactacagagatttttttgggtaaataatgtgatgacaaatttaaatcatttcacagaaaatacccttatttgcctttcctatttaacctacgtttttggtaagaattttgtagaaatttggaggagctcttaattgcctactatgaaggcattcatgatgaatccatggagaatttacttttgaggtggactttgaaagatgaatagaattttgacagaaaaagatgaagtaatagaagaaaaaccttgaacaaagagtgtgccaagaaggagacaacatattttctgtaaaatatgactcctattggaaagtggttagccttagcactgagaagattggctcatggtcacgtagcgtatctcccagatggaagtctaatgtcttgacaattagtcaatagaaagataaacttgttgaagattttagtgaaatcgagtgaaagctgtactaataaggacagaaattatcacacgtgaaaggagagatgggatgtatacaaattttaaatatggtaggcaaaggaaaagaagtcataaaaatacatatgagtaaatgtggagaatcactatgctataaaaattgtgattttttaatgatttgggttttgggtgattattgattagatattcttttaactttggtcgactcattttctaggcaatgttagggtatacaggtaaaaatgtcaggtagaaaatgaaaatagggggttgcagatatggagttaagaatacttcaaataataggctagtttaaagccgtggaaatagaaacgttaaataaaaagttggggaaaaaagtttaaaggcataattctggtaaatactcactttttggagcagaagaaagatgaagaactaacaagccaatgatggcaatactgctagagtttggcatgtcagagaaatcataaaggaaaatgttttaagtgagaggctgaatttaacaagctatagagatatagagaaatagtgtaaagaatatgcacatacatttttattactttagtaaataaaacggttcaggcaatttgacatttattgaataaagaaaagcaaaaatttaacaataagaacacaagaagataaaatgtagaaaagttagaattatatgctcacctcagagtaatatataccagtgtttctggtgaccaaataaatattaatgcatttcttccacacgaaactatggaggacagtttacatttctgatatccatgacatacaggtcatacttaaatttattattaattgatacgatatttgaaatattgggaagaaattcctttccttatgaagaagaaatccctagctgaaactaatgtaaggagccagacagtatgaatgcctctgcaattgataaagttaaggatttactattaaattatgataaagaaatagaaagtgcatagaagaacccagatattgcggaagtaattcatgtaatcattaccttttgaagccacatgatgtcgctgtctaccaagaagttctggttggtcaatgttcaaagtcttttctctgacagcatctgtctctaaaggccgaacaacgggagatgcagcggaattggattaaaagactctgaaagtacagtcgttcatctttatattaagataatattttctgataggaaacgactatttaacatggattatcactggcgaggagagctgggatcctggcgactactactcttgcttctgctcctcgcagcctggaaggtggggagcggccagctccactactccgtccccgaggaggccaaacacggcaccttcgtgggccggatcgcgcaggacctggggctggagctggcggagctggtgccgcgcctgttccgggtggcgtccaaaagacaccgggaccttctggaggtaagtctgcagaatggcattttgtttgtgaattctcggatcgaccgcgaggagctgtgcgggcggagcgcggagtgcagcatccacctggaggtgatcgtggacaggccgctgcaggttttccatgtggacgtggaggtgaaggatgttaatgacaacccgccagtgttccgggtaaaagaccaaaagctgtttgtttcagaatccagaatgccagactctcggtttccgctagagggcgcgtccgatgcagatgttggagctaactccgtgttaacctacaggcttagctctcatgattacttcatgctagatgtgaattcaaagaacgatgagaataaactggttgagctcgtattaagaaaatccttggacagagaggacgctcctgcgcaccacttattcctgacagccacagatgggggcaaacctgagctcacaggcactgttcagctgctggtcacagtgctggatgtgaatgataatgctcccactttcgaacagtctgaatacgaagtaagaatattcgaaaacgcagacaacggaacaacagttatcaaactgaatgcttctgatccggatgaaggagccaatggggcaatttcatattcttttaatagccttgttgaaactatggttattgaccactttagcatagatcgaaatacgggagaaatagtgattcggggtaatttggattttgaacaagaaaacttatacaaaatcctcattgacgccacggacaaaggccatcctcccatggcgggtcattgcaccgttttagtgagaattttggataaaaatgataacgtccctgagatagcactgacttccttatccttgcctgtacgtgaagacgctcaatttggtactgtcatcgccctaattagcgtgaacgacctcgattcaggtgccaacgggcaggtgacctgctccctgatgccccatgtccccttcaagctggtgtccaccttcaagaattactactcgttggtgctggacagcgccctggaccgcgagagagtgtcggcctatgagttggtggtaaccgcgcgggacgggggctcgccttcgctgtgggccaccgccagcttgtctgtggaggtggccgacgtgaacgacaatgctccggcgttcgcgcagcccgagtacacggtgttcgtgaaggagaacaacccgccgggctgccacatcttcacggtgtctgcgcgagacgcggacgcgcaggagaacgcgctggtgtcctactcgcttgtggagcggcgggtgggcgagcgctcgctgtcgagctacatttcggtgcacacggagagcggcaaggtgtacgcgctgcagccgctggaccacgaggagctagagctgctgcagttccaggtgagcgcgcgcgacgcgggcgtgccgcctctgggcagcaacgtgacgctgcaggtgttcgtgctggacgagaatgacaacgcgccggcactgctggagcctcgggtgggtggcactggtggcgcagcgagcaagctggtgccgcggtctgtgggcgcgggccacgtggtagcgaaggtgcgcgcagtggacgccgactcgggctacaacgcgtggctttcgtatgagctgcagccagctgcaagcagccctcgcatcccgttccgcgtggggctgtacacgggcgagatcagcaccactcgtgtcctggacgaagcggactctccgcgccaccgtctgctggtcctggtgaaggatcatggtgaacctgcgctgaccgccacggccacggttctggtgtcgctggtggagagcggccaggctccaaaagcgtcatcgaggcagtcggctggcgttttgggtccggaagcggcgctggtggatgtcaacgtgtacctgatcatcgccatctgcgcggtatccagcctgctggtgctcacgctgctgctgtacactgcgctgcggtgctcagcactgcccactgagggcgggtgccgggcgggcaagcccactctggtgtgctccagtgcggtggggagctggtcatactcgcaacaacagccgcagagggtgtgctctggtgaggggccaccgaagacggacctcatggccttcagcccctgccttcctcctgatctgggatcagttgatgtaggcgaagagcaagatttaaatgttgatcatggcctcaaagtaagtccatttaaatttagaactcataaattctatttgtggaaattgtagttactttaaaagtgtttcagatttagtttttcaccgtattttatagtgaaaatttaaacattgtttagtttttagaaaccttttataattaattgaattttctcagtggcataatacagtattaatcattctccacaagttgggtctatcttgaaactcaagttatggttggatgatatccattttttactgaatatttattttggcctgccttacagccgtcttctctgaacaatactctaaggacgttcagggcattttgatctttggtgaaagtattcccccaaagcgtttattcttttgtccttaggcactgaactcttaatcttactccatatgctgtactttgaaatgcatgttttaaatatgttgtctttatatttacttttattcactttaagatctcggtttattcatcttatctgactttttagtgtctggtagtcacaaatatctttggtgtttcactattgccgttttaagcagtgtagtgataaaatacagaatgatagtgtttttcaaaatttgatagttttcatattcttcctaattttattataaactagttaaaaagtaaaatcaagagggaagagatttgtaatccttcttttaattcattatttagaccattttaccatttggagacatgttttttattctacatgatttttacagttgtattgtcgccaacttaacattttttgagcctctatgtttaggaaatgattactttattcttgcaagtatcttctaaactctaatcattcaaccctttgttcatgagttggaatattttcaataatattccacattaaagtgatatttaatatatgacttagaaaaatgttttcatcagaaaaactatacatgataatttcattcttgcaaaccaaacatataatttataaatccttattatacagaatatttgggattatcatggcccattagttcgtgtaaaaatatttagtattatgggataaatctttgaaaaatccaagatactttattttggtatctttcaacattttctttcttttatttcttcttgtctttttacacgtttgcttcttgtgactgttggacctgcctggatattaaatacccattagacttcgtgcatattgctttggagagaatggtagaaattgatggaagggaatgaacgatttctgggactctgaattcttacagtttgttattagtattgttttaaatcttttaatcacttatgaacaaataatgtaatcatttatgggcatattttagcccccttgtccaactgaaggtaacctcaaagcagcattgttttgtagtttattttacagttctcttaatgcctgtccatgtttagcattttatttgactatttgaacacattgtgtaaaagcgaattgttttcattttagtcctttaaaaaatatgattgttttcatttaagtccttttaaaaaatatgattatctttattatcctgtttgaataatatgtgttttcctttgtgaaagtaatatttcctatcctgtctatgtctacctggttctcaggtattactttaattactgaattctcctaaacatttaattgacttttacaaaatatcataaataggaggattctttccaccacctagcattgtatttggcaatttatcatttaagtcattttagttctgtttttcttcaactctctgatatttgaatttggggttgtgctttcacagtgagaaagtctaaacctatttcttgtacattaatacttttcactattctaattatggtgatgcttttagctattaagaatttctgggattgaaatgtgtcagaagttagttattaagtattgtggattctgaagctctctaaatcaagtcctccctttaccaatttttgtatgtgtagccattggtaaaggatttgttattcagttccttggcattatatgtatgcatgataaatgtgaattctactttatagatttatttgtatcaagtaagttaatagttataaattattaataataaactctggcaagtgataggtacataataaaatttagttattaccattcttaagagaaaagaagttagtgattgcagaaaggcaacctaaaatgtcagaaagtcgttatggccttccatattaatcttatttttgtgtaaaactatcttctgtaaagtcattttttagattaacctaggatgtttcaatattttgaatgttgtgtggtggaatgaaaaaaatctaaaagttattacgagtttaggaaagtcaagttaacaccacctatgtgggaaaacagttttttggaaaggttaaagtccttccaaggaatgtgtagactatcttactttgatagttgtatgtttcccatatttaaaagttgcctgagatcctgcagaggcctgagtaggcgtttgagttctttgtatgtatgagatctttccattaatagtatttttcttaaaaagaagtatacaataatgttttgatgatgatttaaagtcaatttatgttgtagttctatgaattaagtaaaccatttatgtagagtgttgtaaatagccttttaaagtgctttctcttttttcttttcttttctttctttctttttttttttttttttttgagacggagtctcgctctatctcccaggctggaatgcagtggcgcaatctcggctcactgcaacctctgcctcccgggttcaaatgattctccttcctcagcctcccaagtagctgggattacaggtgcatgccaccatgccctgctaattttttgtatttttagtagagtcggggtttcaccatgttagccaggatggtctcgatctcctgacctcctgatccgcccacttcggcctcctaaagtgctgggattacaggcatgagccaccgcgcccagcctaaaatgctttcttagcaagtagagaagattgtaataaccagtcttcattaaacattaaataggacccttacagatctctaacagcatatcatcatgtcaggaattattactgagccccagcccctggctttaaaatttgaggtcaaataaagaatatgagtcacacaatgcaaggcaagataatgtaacaggtacaagaggtaaatcagaatgacgttgaagttgaaagacaatcatttcctatttgaatttttgaagaaatacttgaaggggcatggtgtgtttcagtggttttaaaataagtaagttccccccgggagaatattgagaatgatagacatttcttggaaagagaaaacataaggaaagttgaagacacagaaagcatcaatatgacaagtagaaaagtccactttggttaaaacacacagtctgcagagaatgaaagcaggaaaaccaatgtaagaagatctcttgatttctgagtaataaactaaagggccatgagtgattaaggaatttggccactctttagaattaattgggagctatttaactaccttgagcaaaataaatcacgacttttgaaagaaggttgaacgggaagacaaactcagaagctcctgcagtaatcaaggacagaagcaattgttaaatgcacctcttaggctgttatcagtagaaatacgaaataaaagataaatatgcaaaaacattaatggcacaataaacactcacggttttgcctttagacttgagatacactaaaatctagatttaattaatcgacttggacgttggaataagatagtaaaactcacaacaaaactttgtagaacttagtcaggaaaagaatctcaagcatagctttaaaaacagaaattgccccgagtactaaggatgagcaataatgaaattaaaacatattgtaataacattacacaaactatattggagactacaaagaagagattattcatagattataaagcttggaaagaatcaaaacaacacatttctggaaacagattgtataaatgctacaaaagagaaaaatatattttctccccacgcaacacaagaccttaaagtcaattctcgcttttcttgcaatattttataccttttcaattcatagaattactcaagaaaactacctcagttggttgctactttttgttgattccttttaccagacatgactaagtttctttttcatcagtagatttctgggctcctatattcactagagattgcaactcctggatttctcttacactagaatcctatttcgagccatatgggagattctgaattccagaacaaaagaattttgtaatttaaaattcgtgattgctcaatggaatcattttaattgttacttcatttctgtcgttatttaaaacttaagtggagagttttctcagggataagaaaaccacaatcaaggtcatacaaaacttttagaggcagtcagtctgctaagaaggctccagcaagagaaacgggatcttctgtttcaacaatcattacttaagaaaaaattaagaaaatgaaataagttttgcagaataactgtgaaatttttattcatgaaatatgtacttacactttgggccacgtgatgtcactctttgccgcgatgttctctctgaatccagacaaatacagcccttttcccatgggaaagaggctcaattctttttcactctctctgtgctgaacgatggcgaacacagcagaatgggactgacgaaatcagatgatttcttctaatttggaggcaattttcactaattagaagaagactgagtatttgaaatgttatactcaagtcgaggagatccagagggtcagcctctactgctctcgcttctgatcctcgcaatgtgggtggtggggagcggccagctccactactccgtcccggaggaagccgaacacggcaccttcgtgggccgcatcgcgcaggacctggggctggagctggcggagctggtgccgcgcctgttccagttggattccaaaggccgcggggaccttctggaggtaaatctgcagaatggcattttgtttgtgaattctcggatcgaccgcgaggagctgtgcgggcggagcgcggagtgcagcatccacctggaggtgatcgtagacaggccgctgcaggttttccatgtggacgtggaggtgaaggacattaacgacaaccctccagtgttcccagcgacacaaaagaatctgttcatcgcggaatccaggccgcttgactctcggtttccactagagggcgcgtccgatgcagatatcggggagaacgccctgctcacttacagactgagccccaatgagtatttcttcctggacgtgccaaccagcaaccagcaggtaaaacctcttggacttgtattacggaaacttttagacagagaagaaactccggagcttcatttattgctcacggccaccgatggaggcaaacccgagctgactggcaccgttcaattactcatcacggtactggacaacaatgacaatgccccagtgttcgacagaaccctgtatacggtgaaattaccagaaaacgtttctatcggaacgctggtgattcaccccaatgcctcagatttagacgaaggcttgaatggggatattatttactccttctccagtgatgtttctccagatataaaatccaagttccacatggaccccttaagtggggcaatcacagtgataggacatatggattttgaagaaagtagagcacacaagatcccagtcgaggctgtcgataaaggcttcccacccctggctggtcattgtacacttcttgtggaagttgtggatgtaaatgacaatgctccacagttgactatcaaaacgctctcggttcctgtaaaagaggacgcacaactggggacagttattgccctgattagtgtgatcgacctagacgcagatgccaacgggcaggttacctgctccctgacgccccacgtccccttcaagctggtgtccacctacaagaattactactcgttggtgctggacagagctctggaccgcgagagtgtgtccgcctacgagctggtggttaccgcgcgggacgggggctcgccttcactgtgggccacggccagggtgtctgtggaggtggccgacgtgaacgacaacgcaccagcgttcgcgcagtccgagtacacggtgttcgtgaaggagaacaacccgccgggctgccacatcttcacggtgtctgcgcgggacgctgacgcgcaggagaacgccctggtgtcctactcgctggtggagcggcggttgggcgagcgctcgctgtcgagctacgtgtcagtgcacgcggagagcggcaaggtgtacgcgctgcagccgttggaccacgaggagctggagctgctacagttccaggtgagcgcgcgcgacgcgggcgtgccgcctctgggcagcaacgtgacgctgcaggtgttcgtgctggacgagaacgacaatgcgccggcgctgctgacacctcggatgaggggcactgacggcgcagtgagcgagatggtgctgcggtcggtgggcgccggcgtagtggtggggaaggtgcgcgcagtggacgccgactcgggctacaacgcgtggctttcatacgagctgcagccagaaacggccagcgcgagcatcccgttccgcgtggggctgtacacgggcgagatcagcacaacgcgtgccctggacgaaacggacgcaccgcgccagcgcctactggtgctggtgaaagaccacggggagccagcgctgacggccacggccactgtgctggtgtcgctggtggagagcggccaggcgccaaagtcatcgtcgcgggcgtcagtgggtgccacgggccccgaggtgacgctggtggatgtcaacgtgtacctgatcatcgccatctgcgcggtgtctagcctgttggttctcacgctgctgctgtacactgtgctgcggtgctcggcgatgcccaccgagggcgagtgcgcgcctggcaagccgacgctggtgtgttctagcgcggtggggagttggtcgtactcgcagcagaggaggcagagggtgtgctctggcgagggtaagcagaagaccgacctcatggccttcagcccgggcctttctccttgtgctggatctacagagcgaacgggagaaccctctgcttcctcagattcaactgggaaggtgggtttttctagcattttatttatttatataattttttttcttgaaagatattatcgattactcccaggggccgttcaaatagttttattcatttttctagaaatccagcagattttttttctgataaagtaaaccccttaacattggagccgactttgtcttgacttctagtgagaattataaactgtatattaaatagatattttttgggtgctgaatcaattttatttaaatttgtgattaaagtgacattgaatttctgatgctatgctgccataacacttgaaaaccaatttagttgttagtcattcattaaacattaacatcactatcatttatttattgctaaatgatgcatagtattttagtctacttgtattgtttataagaaacccaagcaaaaatatatagcaattgttaccttgttaagtttgtagttctctacatttctctggatggagactgtgaacatctgattgttcagcaaccttcagtatctattattttaataagaaagaaacttcccctaaactttagaaaacagttgctccactttaggaatcaaattatgtcaataaatgttataaacacagccttcatttcaacttatataaaatatgttttaaaatgcctgacaatgtagataattcaagaaatgttgactgaaattttgtctacacttagaacattttttgaaattcagtttacagaaattggagaaaatgctttttaaacaagtgtttcctttcttcaagaagatattctccttttaattgaaattttctccattcagtgataaaatgatcagccatgtgaagattcgaaacttcgagttcttttgaaattcagagtctgtaacttaaaacattacccttatgaatttagatgagaattcacttgttctgtcagtaatccataagacagaaatctgtttttttaaaaatatctttttctcctctcagctcatacataacacaaggcagaaatctggatatgagatttgcctctttaatgtcactacatgttatgtttcctgaattgtagtatgtgactttcaaaatggtggttttccacactctacctttagtgcaagctatttgtttgttttctaatttatagttttaaaaacttcgcttattgagtttttgttatgtggtttatatttttctttctctttcagctattttatttaatattgtgtcagatattttacaaggtatgacctaattaaaaactcagtagagaaagatcagaatggccttgagaatagagccacaaaaataactatgaaaatgccagtaacgtttatttaaaacaaaatattttaatttttaaattttcccttaaaacacacttttggaatatgctacaatattacatgttttttgtctttttatttttctgagacggagtcgttttctgccacccaggctggagtacagtggcatgatcttggctcactgcaacgtctgcctcctgggttcaagcaattctcctgcctcagcctcctgagtagctgggattataggcacatgccaccgcgcccagctaatttttgtatttttagtagagatggggtttcatcatgttggccaggttggtctcgaactcctgaccttgtgatgctcccacctcggcctcccaaagtgctgggattaaagctgtgagccactgtgccaaggcttttttattttttttttttgtcattttctttcaaaacttgagtggtctctgagctcctgtcattaaacctatctatatctgtctatcagcacaactcaccttgaatatagtcttatactttcaagtatctttgtctttgcacgtttttcaagtttcatgtgccatttaaacttggacccaggtatctgattatttgatgtgaatagagggatgctacagatgtcatttgtctcccgccctaagtcctccagtctccttagagctagtacttactaagcatttactatgtcatcaataatcataaaacgtatttttttttttgagtcagagtctcgctctgttgcccaggctggagtgcagtggtgccatcttggctcactccaagctccccctcccgtgttcacgccattctcctgcctcagcctcccgagtagctgggactacaggcgcctgccaccatgcccgcctaatttttttgtatttttagtagagatggggtttcaccgtgttagtcaggatggtctcgatctcctgacctcatgatcctcccgcctcagcctcccaaaatgctgggattacaggcgtgagccaccgcgcctggcctaaaatgtgttctttattattgacggctgtattgatgggattggtaatttagtccttcatattaatctctattctctctcagagtacaagctctcatcatatgcaaattctcagaagggctgtgaacaccttagtaataaatttatcttttgaggtcattagcaaacatgaactcacagggatccagagatggtaaaattcaaaacagcctgtcaagttcaaaacagagaggtgaaagcagaagagacactttcctattttgcctaataggtctccttatatgcatctgtagttaacattcctcaattcaagttagaatcatgaaacaataatgaagctcctcctatgtctcttttcaagttgtaattactatataggaaaaactaagttgtcacccaatatcttagacactttgagagcaaagggggtgctgtaaataagtatacaagatcacagacctaaattgagcctgttccagacaaattggggcctatggtcaacctatccttagacctgctaacgcattagcattagcagcacctaagtcctcattgaatgttctggttcaaggctccacctcagaaattctgaaatgggtagtaagagcaaattttcattttaaagcacacctgagatgattctcatacaaccgaaattttagatccatagccctatttgatacttgacagtgcaagtttctgtaatttaaaaagatgtggtggcctgacacctgcaatcccaacattttgggaggccaaggtgggagggtcccttccttgagcccagcagtttgagaccaatgtagtgagactcatctctgccaaaaaaaaaaaattagccgggcatggtggcacacatctctagtcccaattactcaggaggctgaggcgagagaatcgcttgagcctgggacattgaggctgcagtgaactgtgatggcacaactgcatttcagcccgggagacagcaagattctgtctcaaaaaaaaaaaaaaaaagagtagtttaactactccctactttttattcaatattggacatctacattgggatatttatgttatcacttggtataaaatgtacattagtagaaattgagtttagtttttattattttgtgcgtggagatgattgatcaatggcaaacttattttacgctccagatagctaaaacaaacgttgatattttgatacataactcattacattttaattcagggtttataaaaaagtaatctctaaaatcagaatttgaatgaattttgatgcaagaggcattccagaggagtagagaagtatagaaacagaatttagtaggacacataaactgatggattaagtgacacccatttctgtcagttttcttattcataaatattgttgctctgtcattcagattttaataaaaaaagtttaaagtaattgacacatttaaaaatattctttagaaaagtcaaaacatcattaaataaaataaattaacccttgcataagaccaatatgtctgttgttaagttttcctttcttggaaagacagaaaactcaagtttttttcagcagcacagatatattacattttcattcctgaatatttgatttcaagaactttgagagagaaaaaaatatttttactgcaagtggtgatgaaaaacttcactgacattgataaaattactagatatatttcagaactgtgtcttttgggcatttgaaaagcgtaaatataacagggttgaaagcatttgcctctgaaagcagaaataataaatttcttaattactttattcagaattataattaagattctttttgcccgtgtaagatattataaaatgaaacttcttgtataaaggatttttctgtaatagtacttttctgttttcttaaatacagaaaccaccactctcagcctgtgcagtagcaataattaaggcattctataggtaataattttgcctgatgagccaaatttggtattgagcctcatgaaaacaaatgtggccaaattgaggcctgagaatagtttccatttatgaagcactcattctccttaaggtactattgcaagcacttactatattataattcactcaaccaccgtattactattaggccaaagttataaaattggaacatgagggagggagaggttaaacgattttcccaagtcatgtggctagtgagtaggataataggaatctaaatggagaaatgtctgatgttgaagctaatgatctctaaattctagtgatgactagatcttcggagttataaacacctcacagatagttgatgcttgacattagtgtctaaataaaccttattaaatctcaaaataatgagaaagagaagtaagttaagtgtcagaacttaaatggaactaaagttgtcatttaataaaatattagtatactcagtagtatgcaaatattaagggcattttgaaattcggctattgataatcatgtggttagggaagaaatcactactctgagagtctacatttaagaaaacattgcacgtgggatcaacatttattgttattaactataaagagacgtaatgtgaggctttgaaagtccatagacataaaaatacgtaaaaaaagaattaacatatgaatgaaagaaaagttgtgaactcatggaatcgtacttacacctaaagccaccggatgtcgctgtcgtccacaaaatagctttttagaacaaaggcatcagccagtttctcaaggactaggaagtagcgtcattctgagatctcagccatttcgataaaaaatagatataagaaataggacagaaaatgtcagatcgtatgtgcgttctagaccgctgattcgtcgatttgtaaaacaagagaaggataagatggtttccagatgtagctgcctgggggtccagtgtctgctgctctcgcttcttctcctcgcagcctgggaggtggggagcggccagctccactactcagtctacgaggaggccagacacggcaccttcgtgggccgcatcgcgcaggacctggggctggagctggcggagctggtgcagcgcctgttccgggtggcgtccaaaagacacggggaccttctggaggtaaatctgcagaatggcattttgtttgtgaattctcggattgaccgcgaggagctgtgcgggcggagcgtggagtgcagcatccacctggaggtgatcgtggacaggccgctgcaggttttccatgtggacgtggaagtgaaggacattaacgacaacccgcccaggttctccgtaacagaacaaaagctctcaatacctgaatccagactgcttgactctcgatttccactagaaggcgcatctgatgcggatgttggagagaacgcattgcttacttacaaactcagtccaaatgagtattttgttcttgatattataaacaaaaaagacaaagacaaattcccagtgcttgttctgcggaagctgctggatcgtgaagaaaatcctcagctaaagttgttgttgacagcaactgatggaggcaaacctgaatttaccggatctgtttctctgctgatcctggtgttagatgccaatgataacgcccctatctttgacagaccggtttatgaagttaagatgtatgaaaatcaagtgaaccaaacattagtaatacggctcaacgcttctgattcggatgaaggaataaacaaggaaatgatgtattcatttagctctttggtcccacccacgataagaaggaaattttggataaacgaaaggacgggagaaataaaagtaaatgatgctattgactttgaggacagtaacacttatgaaattcatgtagatgttacagataagggaaacccacctatggttggtcactgcacggtcctagtggaactactggatgaaaatgataattcacctgaggtgattgtcacttctctgtctctcccagtgaaagaagatgctcaagtgggcaccgtcattgccctaatcagcgtttctgaccatgattcaggagccaacggacaggtcacctgctctctgacgcctcacgttccgttcaagctggtgtccacctacaagaattactactcattggtgctggacagcgctctggaccgcgagagggtgtcggcctatgagctggtggtgaccgcgcgggacgggggctcgcctccgctgtgggccacggccagcgtgtctgtggaggtggccgacgtgaacgacaacgcgcctgcgttcgcgcagtccgagtacacggtgttcgtgaaggagaacaacccgccaggctgccacatcttcacggtgtctgcgtgggacgcggacgcgcaggagaacgccctggtgtcctactctctggtggagcggcggttgggcgagcgctcgctgtcgagctacgtgtcggtgcacgcggagagcggcaaggtgtacgcgctgcagccgctggaccacgaggagctggagctgctacagttccaggtgagcgcgcgcgatgggggcgtgccgcctctgggcagcaacttgacgctgcaggtgttcgtgctggacgagaacgacaacgctcccgcgctgctggcgtctcccgctggcagcgcgggcggtgcagtcagtgagctggtgctgcggtcggtggttgcgggtcacgtggtggctaaggtgcgcgcagtggacgctgactctggatacaacgcgtggctgtcgtatgaattgcagtcggcggcggttggtgcacgcatcccgtttcgcgtggggctgtacacgggcgagatcagtacgacgcgcgctctggatgagactgactcgccacgccagcgcctactggtgctggtgaaggaccatggcgagccgtcgctgacggccacggccactgtgcttgtgtcgcttgtggagggcagccaggcacccaaggcctcgtcgcgggcttcagtgggcgtggcgcccgaggtggccctggtggatgtcaacgtgtacctgatcatcgccatctgcgcggtgtccagcttgctggtgctcacgctgctgctgtacactgcactgaggtgctcggcggcgcccaccgagggcgcatgtgggccggtgaagcccacgctggtgtgctctagcgcggtggggagctggtcttactcgcagcagaggcggcagagggtgtgttctggggagggcctgcccaaggcggacctcatggccttcagccccagccttccaccatgcccaatggtagatgtggacggggaagatcagtctattggaggggaccactctaggaaggtgggttattacgttttcattttccttttgtgctttatgaataatattttctcttaccgcattttctcaaatatgtatcagaatatttcatttttgtctacattccatttatgcttgaatatttctagtgatacctttgtaatataatttattccaggagttttaaaatttttttatcctacccagtgtgtcagcctttgattggtacttaaatttttttaaataacaatttattctgaatacactaatattttccaatacaaatatgtgatataggttgcagttctgacgatttactttcataatcacttttcgttacaaatatttgtgagattagtacttcatgttatttcatttccaatctaaattttgatttgattgtatttgcattaccaaaaaattccactgatctatatctcttcagtgaaaatgtgttttcctccatgtgtagaatatgtgtagcgtaccacagcttatactgccatagtagatttcaatgttcagtgattacagctttttctcaatagtgcagtaagtaggtgggcagttcattggtaaaaatttcttaatcttagcaattaagttaaatgctttgaactttaaaaacgttttccatttttattttagttgtagtggtacctgtgtcagtgtgtattattcacttagcagaagaaaatgtatgtttcttttatttacataattttatccagtagctcttcattatctgctcctttatcagcattaggcattgcttatgatattcaggtattagctctttcactttaaggaaggagtcatgcttatgtttaataatgaagagaatttgaacactttttacttttgagactgaaaatactttagtatgaattaatattaaaagtttgaggagaaaataaaattaatgttttctactgatctgatatattgtatagtttaatagcttctctagtcatcttaaacagggttgggttagatgatatagactcagaaatgaaagctaacttagttgcagagtgacaaaactacactatcaattgtgttttcctgaaattggttgttacctgatacccatgatttcatttttaaaaaaaatttattaattctagtgttaccaaacaccaatgccatgaatttgtcatcttgcctatggctcttagcaattacttttttctttcctttctctttgagtatggagattgaatttgttactcagtacgtgcttcacaaatagcttcaaataaaattaaaattattgttcaagtttaggaacaccaaaaaaaaattgtggcaagaatttaagcatggcattctttcagtgttaatactctccatgccctgtctccagctcttagaaattatagatgctaagttaatgcagagtttagaagtgtatttgttattttatcaaataggtttatgaaatatatacttccccctctgatattttgaaaaaaaatcttccttaatgtcttatattataagtaatataaaaaacttagtaaaaactcatatcaattgtaaaagtctcaggtatacaagtgcattaatctctccatcaatactaacttaaggccaggcatggtggctcacacctgtaatcccagcattttgagaggccaaggtgggaggatggtttgaggccaggagttcaagaccaacctgggcgacatagggatatcttgtactgtgtgtgtgtgtatatatatgtatatatgtgtatatatatatgtatatatatatgatgggctctccttacatatatatctatatatgtacttatgtatatataagccaggcatggtggtacatgcctttagtccctactgtagtgctacttgggagggtgaggtgggaggacggcttgagcctgggaagttgaggctgcagtgacccatgattgtgccactgcactccagcctggatgacaaagtgagaccctatttcaaaaattgaaaaaagcaaaagcaatagtaacaccattatcctgcaaatatgatctttttcatattaattcacgtgataatacagttggtgcagtagtactttatttaggatgtctacatacaagataaaactcttcatggaattctgatttgtaagacaaacccacctttgaagaggtactgatcatacacaagaaggtataggaaaggagttggaagctcacaaagagaaacataaacatatgcaggaatcaggaacgaagaagataagtgaaataatatgaaatcaaatgcacttatgttttgagcgacaggatattgttgttctccatgaaaagtttttttggtttttttgttttttattttttatttttttgagacggagtctcgctctgttgcccaggctggagtgcagtggcacgatctcggctcactgcaagctccgcctcccaggttcacgctattctcctgcctcagcctccggagtagctgggactacaggtgcccgccaacacgccaggctaattttttgtatttttagtagagacgaggtttcaccgtgttagccaggatggtctagatctcctgacctcgtgatccaccggcctcggcttcccaaagtgctggccgagtgccaccgcacccggccgaaaggtattttttttaacagaagaaaatcagattattcctagatcagaaagaagctccattgttcctgtactttaaaaactacaaacacccattaagaccacttggaacctcaggaacaaggaccaaaaggtctcagaggaactaagtctttctagtcatgaaatattgttttactaaccaaaagagaggcataattttagctgctagacaaagtggccaggaatcccggagcctacagcactggcttctgctccttgaattttgtgaagcgggaaaggaccagttccactacaccatcctggaagaggccaaggacggcacatagcgtcttcgcggtccctattgcgcaggacctgggtctggagcttgtggagctgataccgcgcctgtttcagttggattccaaaagccgcagaaaccttctggaggtaaatctgcagaatggcatttttgtgagttctctgatagacctcgaggagctgtgtgggaggatctcggagtgcagcatccacctggaagtgatcgtggacaagctgctacaggttttccatgtggaggtgaaagtgaagaacaataaagacaacctgccagtgttctcagcaacacaaaagaatctgtttctgaaacgagagctcttgattatcgtgtttcactagagggtgtctgtgatgccgacgtcggggccaatgctctgatgacttacatactgtgccgcaatgattatttttccctggaaataccaagagcaggtaaaaccacttgaaggtgtattttaaaaattctttcagataggtaagtcacttcagagctactcttggtgctcaaagcaactgatgggggcgaagctgagctgacaggcaccaaagcattatatatcacagcgctggatgtaaatgatgatgcccagtgtttgacaaaggagtctatcatgtgaaattactggaaaatgcaagagaaggtacactggttattagacttaaccccttggattttgacgagggttcaaaccgtcacattgtttctttgcaactgatgtctcccctaacatagaagccctttttcgcatagattcagacagtggataaataaatgtaaagataggttttgaggaaactaaataatgaaagattcaaatacaggcagttgacacaggcaattccccaatgtttgatcactgcacagacttgatagaagtcttggacatcaatgatagtgttccagagttagcagtaagtcactatcattccctgtacaggaggacgctccactgggtaccgtcatagccctaatcagtgtaattgaccctaacttcagtgccaagggacagacgacccgcaccctgactcctcacgtctcttcaagctggtgtctaccttcaaaaggcgctgcccagaaactattcgttggtactccacagcgccctggaccaagagagcaaatctatccattgttggtaatcgctcggaatggggactcgctttcattgttggccacagccatcgggtccgtggaagtggccgaacagtgaaccacaatgccctggcgttccagcagcccgagtacatggtgttcgtgaaaggtaacaacccgcggggctgccacgacttcacagtgtccgcgcgggaccgggacgcgcaggagaacgtgctggtgtcctactcgttgatggaacagcgggtgggcgagtgcgcgctgtctagctatgtgtgggtgcacgcggagagcggcaagaggtacgcgttgcagccactggactacgaggagctggagctgctgcagttctaggtgagagcgcgcgacgcgggcatgccgcctctgagcagcaatgtgacgctgccaggtattagtgctggaacgacaactttgtctgcgctgctggcgccttgggtgggctggcggcgctgtgagtgagctggtgcggtattcagtggatgcaggccacttggtggcgaaggtgcgcacggtggactccagctatgacgcctggttgtcgcaacagctgcatctgtcagctggcagcacccgttccacgtggggctctgcacgggcgagatcagcacgacgagtaccctggacgaggcgaaagctacgcgccaccgcctgctggtgctggtgaaggaccactgcgagctggcgctgactgccaccgtcaccgtggtggcgtcgctggcggagagcagccaagcgaggaaggtcccatcgcgggctttggcgggcgtcgaggtccgggaggcagcgctggtggatgtcaacgtgtacctgatcatcgccatctgcgtggtgtccagcctgttagtgctcacgttgctgctgtacacgacgctgcggtgcttggcgcagctcaccgagagctcgtgcatgccgggcaagcccacgctggtgtaccgcagcgtagtgggatctggtcttactcgcagcaaaggagattttactctggagagtcgcctcccaaggtcaacattacggcttttagtcctagtgttctcccatggttcagattttggagatggacttcaataggaaatttttgagaatataagtactgtaatcctggaaagtatttcattcctattaatgtccctcatagtgacattgataatgttcaccaagttattaatttgattgctttatttattttgcttttgctttttcttttgagatgctttatttaaagtacactggggccgggtgcggtagctcatgcctatttgtaatcccggcactttgggaagccgaggcgggcggatcactcgaggccaggagtttgagaccagcctggccaacatggtgaaactccatctctactaaagatataaaaaaattagctgggtgtggtggtgcgcacctgtaatcccagctactcaggaggctgaggcacaagaattgcttgaacctaggaggcagaggttgcggtgagcctagattaggccactgcactacagcctgggagacagggtgaaactctgtcttaaaaaaaaaagtacattggaagtctagccatcttaatcactttttactacagtcaccatgaacattctttaggaatattcttcagttgataagtataatgataatagtaataatgaattagactgagtggctgtttcctgtaaatgagaaagttaaatcttaccggaaggatcatgatgaataatgatccttatgagaaggtcaaatcttctcaattttgaagcaagttctttattcctattcattttcttattctgatttgtgtcctccattccttattgtttttatgtattcaaaaataccatgacaatatttaatatcataattatttgagtttaaaacatgtttaaatgtttatctttctataatcgataagtttatctctcacaaatggtgatgagcagggttgaggcagcttcgtccacaaacaattttgtttcttcatgatcaatatccatcttttttgagatgttgattgcagtgggtggaattttagccttgcctttaaaggtgattttacttcttaatttttgtcttcaatcttcttataatttcattttaggtcattgtcttcacaatcttcaactacttcagatagccaacaactttgttcttttttaaaaagaaaacaaaacaaaacaatgtcagctctacttaattacctgttgacttaattgctgctgtcctccagtttaagttgttgagctcttctactattttgggaagatttctttgagcaccgattatactcatttttctttcatttttggtacctggctgtatgaaaatattttagggtaggaaaattcacacttatttgggctttaagtataagagagtcttcccatacatgatgaagggtgataccattgtctgtgttcattaagctgcatggtcttcagaatggcattgctgagcttggcagggtgtctcaggcctgtaatcccagcattttgggaagccgagggaggaggatcgcttgagaccaggagtttgagaccagcctcggcaacatagtgagacccccatctctaccaaaaaatgtcattgtttttaataacttaagtataagaaccatgggatattaataaaggcacttccacttgacaattgtggtgttaattataccttagaatttaacattgtatacttttgatatatttgatgcaaaatattttttgccttcacaccatattaatgtgaattgctttctttaaagggatcccagagaacacgtatttatagctgtaaggatgtgtatcaaattatatgtaaaattactttgctctttttggctctaattacaaatgagatggcctttaattctgtgtaaagaaatagtatatttacatattgcaggataaccatgttataggtagggtaaagttaatataaatgctgaaaaggaattagtagtgtctacctagaaaaataacttctgagaagatgatttctatgaagataaacattaaggaaatcttcagaaaagggaaaaccctgtcctactttatggtgctggaattctcttcatccatagctataggacaagagccaatattgatcagtaactcatgataataaatcaccattgtttgagcagtttattaatatatttgttagacatcatgaagggacttaaatacattatttcatttaatacttataacaatttctaaagtacatatgactgttccaatttgaaagataaaataagagaagctgagatgtgtatctattttatccagtgccagtacatggtggagatattattcaaatgtgtatctttcaggcttcagactcattcttttatccactataatgtagagctttctttagtaagtcatttctctgctcaaacatggtctcggctaggaaaatcaagcacaaattgtgtacaggcaaatctttctttctgttgtgcttagaagaaacttcatgattgtcttcatcattaattttgtacaatgtgtgattgagatggcactaagtttttttatgttaagtgatttttttcttgtaagagttcgtgatcatcattatcatttgttttaatcaatgccacactgagataggtattttggttatgtaattgttaagtaattaagagttgccttataagaactacgtatctgttgtttggaagtgatataagtaagaatcgtttaacatgtaagaaaagtcagaaaactgtggtttccaatatccttgtggaacacctaaactaaatactatataccaaaaatgacacccttctttctttactgtgaataaagacagtgtttgggacaagtatagatgttgatattattatttcagggaccctgaacttggccaaaggattcaagaaatgtttacaatattgcatacttcaataacaattttaaagacatagattcccatgaaaatcttcaaatgtgtgtaggtctttcagtcttcttcagtcttattgttggctgggaagctcataacaactgacaaatgatttgtgaccaaataactgtttttacttgactaagccatgatagagcagaattagcatcacggaataaatcctataattttgttaatacagtggttggataatgtaattctaatctgttggttttggagaacctcctggggttctgacaacggtgtcaaaatttatttatgtgttttcaagaaataatagcactaggtctgttagaatatcagtggatgacgtgcactagtaagacattaaactatgcactctaatacttatatgactaacaggacatacaggcagattgtatgtcctgactgatatagtaaaagtcaggcacaaagttccttaatcttcaattgattttacaaaatcagttaacaataactgtattgaaatgacttcttggtattagcctatacccagatattaggctgatcctcaaagatgagttcaaagggcgcataatctcttcactaggggctggttgagatggtgacatctgaaatatcacagccaaaatgcaaaagatgggtcattgattcatacactatatcaaactcttttatgacttggcgtttgttcagtactactttatatattcacaaaatactgtattgttggaaattaacacctaaattaacatattgttttaattcaaatatgtgatattatcatttttccagagtaaaccttctaaggttcatttccctacctcgcaagactccacattccatgtaacatcttcatccccaattcccataataaggtgattgaggatctgttgtttccttttgttcaaaataaacctgatgtgcttcaaatatcatgttgaatatactgtcatctggtctaatgttatgttttgattagaggctactatgattgattattttacagatgcgtaatggaattaacggttataaaagttgatatgtctcctttaattttttaatacagaattttgcatttacctgaattagagttctagtgttatgacaacattgggaaaagagtaaatatgaaaaaagtagaacaaaatctcaaattaatagttgaatatatatataaaatattagcatacacatatgataactttttcatatgcccttgcagtatttttagattggagataaaccatcaaaactatagaacaaaatatttaagctagagtgatatttattctaaatcactttctactctaaaattttgttgcatcttctttttttcctcctaaatcctaagggtatatgaaaagacaaagaaaattcaagcaagttacaacttcaggcaaagaaaactctcataagcaattcctgtattttacttagcattttctatgaaattccatttccacaagcactaaggtaatttaccatttagttgaattgtttgattaattttctatgttttaagcacaatatcaggtacttacagaaggtataattaaaaatcacttcccttgttttccatgaacttctgctcccaaacccaaaattctttcaacaagaaacaaactattttcatgaatataactgaattagattaaggaaaccaatgttggtgacttggaaataccaatatggcacaaagatgttcagggtgattttatttattttataaaatgataataaaatttattttatagttgaaaagcctatttctgtcatatcattgattctgttacataaagtgctaaattttgatatctcatattatgctactatggcttacattagaaataatatatgtcaaataaaaactcatctagatcaatagacttttcctttgtggattcttttttaaaactaccaagtttgagaatatgaatatatttgtttttcatattgttctgcaatgaatataaagtcacttataatcagaaagcaattaaatgtaaataacagtaaagaatgagaactatagaaaatagatatgaaaatgcaagcccacagagatgagaatagatcatgtggaacataaacactaaagagctgcttttataaaacttcaattttttctttgagttccctagcagccaaagtaacaagggagactgaaagtaaaacaattcaaatttgatagtatttttatatgaggaacaacactttcaggaaatgtttaaccctagtttttcatgaggccaccttaacaactgaattctctttctctctcactctgtgtataagtattttagataagtaaaagaacaatgttataatgttaagtcaaacatagacacaataatttaaatttgatgttaatcgagaaatacaatgccatttccatatatatttagtttcaatatgacttataatctgaatattccataaataagcacgttggaaatatttgggggaagaaacccaaaacacgtgaaattctgtggtggtaaatgcagtgcacagtactcacagttttaggcgcaaggtgtcgctctttacttggtggaaagttcatttaaaggttggtctgaacagtgaggcactcccatacaaaggaactccatcataccggatgccaccgtttaaggatcctttgaaacttcttaagaattcaacgagatttttaacctgaaactgaagaatctggtactgtaagtgtaaagaagcttattttggaagccaatttcgtatgcgatgtttggttttcagagaaggggattgggcaccccacgactacagctctggcttctcctcctcgaattctgggaggtggggagcggccagctccactactccgtctcggaggaggccaaacacggcaccttcgtgggccgcatcgcgcaggacctggggctggagctggcggagctggtgcagcgcctgttccgggtggcgtccaaaacacatggggaccttctggaggtaaatctgcagaatggcattttgtttgtgaattctcggatcgaccgcgaggagctgtgcgggcagagcgcggagtgcagcatccacctggaggtgatcgtggacaggccgctgcaggttttccatgtgaacgtggaggtgaaggacattaacgacaacccgccggtgttctcgctcagagaacaaaagctgctgattgcggaatctaagcaatcggactcgcgttttccactagagggagcttctgatgctgacattgaagagaatgctctattgacctacaggctaagtaaaaatgagtatttttctttagattcaccaacaaatggtaagcagattaaaagactgtcacttattttaaagaagtctctggatagagagaaaactccggaacttaatttgctgctaacagctacagacgggggaaaaccagagcttactggcaccgttcggctgttagtccaagtcttggatgtcaacgacaatgatccagagtttgataaatcagaatataaggtgagccttatggaaaatgctgctaaagaaactcttgtgctcaaactaaacgccacagaccgagacgaaggagtcaatggagaggtaacatactccttaatgtcaattaagcccaatggaagacacttatttacactagatcaaaataatggagaagtgagggtcaatggaactttagattatgaagaaaacaagttttataaaattgaagtacaggctacagataaggggactcccccaatggcaggtcactgtacagtctgggtggaaatcttggacaccaacgataactctcctgaagtcgccgtgacttccttgtccctcccagtacgagaggacgctcagcccagcacggtcattgccctgatcagcgtgtctgaccgtgactcaggtgtcaacggacaggtgacctgctcgctgacgccccacgttcccttcaagctggtgtccaccttcaagaattactactcgttggtgctggacagcgccctggaccgcgagaacgtgtgggcctatgaactggtggtgactgcgcgggatgggggttcgccttctctgtgggccacggccagggtatccgtggaggtggccgacgtgaacgacaatgcgcctgcgttcgcacagcccgagtacaccgtgttcgtgaaggagaacaacccaccaggctgccacatcttcacagtgtcggcgcgggacgcggacgcgcaggagaacgcgctggtgtcctactcgctggtggagcggcggttgggcgaccgcgcgctgtcgagctacgtgtcggtgcacgcggagagcggcaaggtgtacgcgctgcagccgttggaccacgaggagctggagctgctacagttccaggtgagcgcgcgcgatgcgggcgtgccgcctctgagcagcaacgtgacgctgcaggtgttcgtgctggacgagaacgacaacgcgccggcactgctggcgactcaggctggcagcgcgggaggcgcagttaacaagctagtaccgcggtcggtgggtgcgggccacgtggtggcgaaggtgcgcgcagtggatgcggactcaggctacaacgcgtggctttcatatgaattgcagccggcggcgggcggctcgcgcatcccgttccgcgtggggctgtacacgggcgagataagcacaacgcgtgccctggacgaggcagactcgccgcgccaccgacttctagtactggtgaaggatcacggtgagccggcgctgacggccacggccaccgtgctggtgtcgttggtggagagcggacaggcgccaaaggcctcttcccggactttggcgggcgccgcgagcccagaggctgcgctggtggatgtcaacgtgtacctgatcatcgccatctgcgtggtgtccagcctcctggtactcacgctgctgctgtatacggcgctgtggtggtcggcaacgcccactgagggcgcgtgcgcgccggggaagcccacgctggtgtgctcccgcgcggtggggagctggtcatactcgcagcagaggcggcagagggtgtgctctgaggagggcccacctaagacggacctcatggccttcagccccagtcttcctctaggtctgaataaagaggaggaaggggaaagacaggagccagggtcaaatcaccccggacaggtgagttttctacagattccacctatcaggaagtgtatgtgaaattatttaaaatccagttttttttcacggattttttaagggaaagttttatgaataaccagtgttttgaatattgttttagataacaatgtctgttcataaaataccaaatgatacacatcttcagtcttttaatcatatgaataatctggcttctttaaccaataaatgtcctatttctcttaatatttggttagcaaatcctaaaagaaatgagatgcaagagtgactcttctgtagtcacttgagtagaaataattactattttcactaaagtacccatgccccttcatctctaaacttcaattatgaccataataactatggattatttaaatttgctcctctttgtcttttagcagagttttgccttgatatttccacattgttagatcaactggctttgtttttctaaagggaggaggtcttcctatgatgtccaggttggactgcagtggctatttacaggtgacctgtagcctggaactgctaagctcaaagaattctcccacttcagcctccagagtagctgggaatgcagtgccactgcacttagtccattggctttcctaacttcaggcttgtatcaaagctagaatactccattagtatgacatgatttacttttcttttttttttttacagtgttaaacgttcatcataaattcattatatatgaaacaatctttacttttgtctttattcctgtgataatacttgttttcatattgtttgaagaaaaaagttaagccttgcattcttatatgctgctttatggaaataatatgactaaaattctacatgttcttgccaggcaaagtggttcaggcctgtaatcccagctatttgggaggctgaggcaggagaattgcttgagcccaagagttcgaggcctgcctggacaacatagcgagatcctgtctctataaaaaattaaaaaattagccagacctagtggtgcatgcctgtagtcccagtttcttgggaggctgacatgagaggatcccctgaacccaggggttcagggctgcagtgacctatcatcgtgagacccccatctgaaaaaataattttttttgcctgttcttgattttgttccatgaaaaggcaagagatttgtcaactattggatactcaaacaaaatggcatgatttatgattccaaaggaaactaggtaaataaaattattcaaattatctaaacttgctaaagacatgcatatagggctatattatctataatatatgctagttggcattcttccataagtttttcagattcatctagcagagaaaaaattaaatatattaatgtgagtacctactgacaattatcagtttcattcatctcactttgtaactgctctatcttgtaatgccttatctctaatgtttttgaaattttctttccacgtagtatcatcccatctgaagatttgagcaaagatcatttacttctgagtcattcttcatatttagttattcttactacacgtagagtggtggtattacagactttcttgagaatcatatctagctatttcccccccgtatagaggcataacataccatttggcacaatattcaaagagtctatgctgaagcctattcatagactttagatcgagagcttttgtatcataatattcattggctaaaaacattctttaagtattaaagagaaggcaacaatataaaaatataaaatatttcagactcaaaagtgattaaaccatcataccacttatgaaactttataaatataataaaggtgaatattagatagggcatacattactcatctccagatgaaatttttggaataactgaagatcttttaaagacttgggaatgttttcagtacaggttaaaattttgtaaattattattttatatcacataaataacaaatttgcattttagataattcaaattacttggactgatttctgcaaagttgtgtcttttatacttaatgccaagattgcattctatggtataaaattataatttcaatttattttctagtttggttgtttaagtattaagctaaacttagatgttcctattggcttaacaatttgtttaggtcaaagagtatgtgagaactacataacacactattattatttgtttctttttgagatagagtcttgctctatcacccaggctggtgtgcagtggcgcaatctcagctcactgcaatctccacctcccatgttcaagcaattctcctgcctcagctttccgagaagctgggactacaggcatgcaccaccactcctggctaatttttgtatttttagtagagatgggttttcaccatgttggccaggctggtcttgaactcctgacctcaggtgatctgcctgcctcagcctcccaaagtgctgggattacaggtgtaagtcactgagcccagcctattttttaaaattaaagttccttagcatgtatggtacattgaccacttttgaaaatgaaaaataggaaagaaacttggtgatgatattagacaatttaaataattagcctgatgacatcaaaattcaaatatgtttttaattacttaacgttttatagtttatttaagttatcttatacttgtagagccattcttggttactctttcctggtgttgtaaaggtgtcatatttcagttgcctttattattatatgcagtaggaatgaatggcaacaaattattggtttaaagattttgacttgagtattaatagacttacaaaatctatgtgtacttgttcacaatgagttgtaggatcttatctgtttttttctcttaaagctgatcttgaattaatgaataaactcatgaaaggtcttttgatgcccccttgcataacagtcaccattctgattttctgaagagaagcatgtcctaactactaaatgacctgtaggggaagatttagagaaaaagcaaaaggttgatatcaagttcacattctcttgactttagtcaatgagattaggctccaaaaccctttaagagatctttcgcattttagtgctccattgttgctttgggatagtgtgaaatttggaggcttcaactaaacattttacattaaagtgctttacttttgctagagtaaaactttccagaatctattcctgagatttgttttaacatgttatggaaatgagagcagttatgtgaaaagttatcacattcaagcatcaaggaaccaaacaataacgctctccatatttatgatgaattctaactttcatcagatttatgaataagacaatttatataaatgaaatattgtttggtattagacatattttagtttcttatcctttgttaaatacaaattcctaactttctctaaaatcttacgatggagtgcttgtgaaggttaaaagttattgaaacagcggaattgtaagctatataaggggaggggtgctgtatattattctgtatatcattttccatgataaagtgtaggttctggcctactgtatttgaaagatttctactttgaagcagaaaacatttttaagctacagcgtaataaaattgttgatgttttgttactaatatcatgtatattaactaaacccgcatttataaatgatccgtgaaaaataacccaaagtcgaaacattagaattaagagtgacccaggaagtggctaaaccgaaaagaacctcaggatctttcttgtacttacataatcagtcacatgatgtcgctctacactcagaaggtgaaacaggaaaatttttttctccgcacccacattccaatcattcacggaataggatcgactccataatgactgtgatgctggaaaaaatttactaaatatgtacttacagaaaagggtgactgctcataaaatacctcaggcaagcgatcccttaaaactgattgtcccaactcagaggccctcattttctgcaatggtgattatcggaccaagaggcccgggatcccagcgtctgctgctctcgcttctgctccttgcagcctgggaggtggggagcggccagctccactactccgtctacgaggaggccaaacacggcaccttcgtgggccgcatcgctcaggacctggggctggagctggcggagctggtgccgcgcctgttccgggtggcgtccaaaagacacggggaccttctggaggtaaatctgcagaatggcattttgtttgtgaattctcggatcgaccgcgagaagctgtgcgggcggagcgcggagtgcagtatccacctggaggtgatcgtggacaggccgctgcaggttttccatgtggacgtggaggtgaaggacattaacgacaacccgccggtgttcagagaaagggaacaaaaggtacctgtttctgaatctgcgcctctggactctcattttcctctagagggcgcttctgatgcggatatcggcgtaaactctcttttgacctatgcgttaagtctaaatgagaattttgagcttaaaataaaaacaaaaaaagataaaagtatattgcctgaattagttcttcggaagttattggacagagagcaaacgccaaaactcaatttattgctgatggtaatcgatggcggtaaaccagaactaacagggtctgtccagattcaaataaccgtcctggatgtgaatgacaatggtccggcgtttgataagcccagctataaagtagtgttgtctgaaaatgtccaaaacgacacaagagtgatccaactaaatgcttccgatccagacgaaggacttaatggagaaatttcctatgggatcaaaatgattttgccagtgagtgagaaatgtatgttttcaataaatccagacacaggtgaaattagaatttatggtgaactggattttgaagagaataatgcctatgaaattcaggttaacgccattgataaagggattccttccatggcaggtcacagcatggtcctggtggaagttctggacgtgaatgacaatgtccctgaagtaatggttacttcactgtcgctccctgtgcaagaggatgctcaggtgggtaccgtcattgccctgattagcgtgtcggatcgtgactctggagccaatggacaggtcatctgctcactgacacctcatgttcccttcaagctggtgtccacctacaagaattactactcgttggtgctggacagcgccctggaccgcgagagcgtgtcggcctatgagctggtggtgactgcgcgggatgggggctcgccttcgctgtgggccacggctagagtgtccgtggaggtggccgacgtgaacgacaatgcgcctgcgttcgcgcagcccgagtacacagtgttcgtgaaggagaacaacccgccgggctgccacatcttcacggtgtcggcatgggacgcggacgcgcagaagaacgcgctggtgtcctactcgctggtggagcggcgggtgggcgagcacgcactgtcgagctacgtgtcggtgcacgcggagagcggcaaggtgtacgcgctgcagccgctagaccacgaggagctggagctgctgcagttccaggtgagcgcgcgcgacgccggcgtgccgcctctgggcagcaacgtgacgctgcaggtgttcgtgctggacgagaacgacaacgcgccggcactgctggcgactccggctggcagcgcaggaggcgcagttagcgagttggtaccgcggtcggtgggtgcgggccacgtggtggcgaaagtgcgcgcggtggacgctgactccggctataacgcttggctgtcctacgagttgcaaccggcggcggtcggcgcgcacatcccgttccacgtggggctgtacactggcgagatcagcacgacacgcatcctggatgaggcggacgctccgcgccaccgcctgctggtgctggtgaaggaccacggtgagcccgcgctgacgtccacggccacggtgctggtgtcgctggtggagaacggccaggccccaaagacgtcgtcgcgggcctcagtgggcgctgtggatcccgaagcggctctggtggatattaacgtgtacctcatcatcgccatctgtgcggtgtccagcctgctggtgctcacgctgctgctgtacactgcgctgcgttgctcagcgccgcccaccgtgagccggtgcgcgccgggcaagcccacgctggtgtgctccagcgccgtggggagttggtcttactcgcagcagaggaggcagagggtgtgctctgcagagagcccgcccaagacggacctcatggccttcagcccaagccttcagctgtctcgagaagattgtttaaatcctcccagtgaagtaagttattaatattatttagatatatttgtttccttgaagaacttccgtttaggttataactacattctctcatttttctttatgattctatcctttaaactatcgaatgtctcatctttcttggtcattcttactcattttgaacttttatgtatttgtctaacattaatgaaggaaatatgtaggtacaatggaggccatggagcaccacacttaatatttttctttttctataatattttatatgactgatgaaccttgaaaaaaacagtatattagattaaaaagtggccagatgtttgataacttaaaaatttaatttgttcataatttcaagattacaggtaagttgcaagaatggtacaaagagttcctagatcccattaatggattctttaactcttcctcacgtgcttaggcttttaaaatagccttcttgatcactattctaatttcagtacaatctagacattttcacattatattccaggtattatcacaataatataaatgatatgtctgacatatgatgaatgattttcttcattgctcacaaaatatcttctttatttcaagtaggaatagatactgtactattcttatttacatgaaatataataaaatcatttctcaatttaaaaatatttaaccatctgtacgatacagtacagttggtaaccaactgtggctcaaaccagtttcagatgatcccaaacttatcatagtataccactgccctgtgcctattaccaagtgaatcttctaatgtgcattttacatattttaactttctatttctacaaaaatatccagaggcttctctttaaccagggaataaagtcttacataccccagcctggtagtaaaggcattaaaatttccagccttatatctactttcttacatatctttagtttaggatctggaatatagtatatgttcaatcactttttaaaaacatatgggggtcttgctatgttgcacaggctggactagaacttctgggttcaactgatcctccatttcagcctttcaagtagctgagactacaggcaggctccaccactcccagcttcaatcaataattttaaataaatatatggtattgaaatgtattacctggacattcccctctatcttagaaatgagagtatgccctagaaatcagataatgttttattgaagagtgtcttgaaagatagacaacattttaccaagaaagtgttaagagagataagtaggaacaactgcacagtatatggtgtaattgaaggattagagcaggggagattgtgaaggcaggaaagctatttcttttttaataaattaggtatcaagtaatggagacttaaattatggcagtagaaatgaattgaaaaagacatatacaagaggcactggcaaagtagaagcagccagataatgacagactcaatacaaatgataagagaaaaacaaaagtagaagttgactctcacttttttagtttgttcagctgagaagatgacattgccattaaccaacctgcagaacaaggttggagaaacagtttgtgtgtatttgagcaggtagggaatggagatgaacatttaagaaaatgttactttgaagtcctaagagaataccgttgtgattggaaatatgggtctggatctcagaagagattattgatatagattttgggaacaactcctttagagaaaaaaataatccatgaaagaataaaattgccaagacagacattgaaaagtgaaaaacaatgtgtccaggtacttaggtgggtaagtgtgtcgcttcctgtggctgctataacaaacgaacacaaactgggtgctgtaaaacagcaaaagtttattatttctcagtattggagaccagaagtccaaaatcaaggtgttgtcaaggctatactctctttggaggccccagggaagaatctggtttttgtttcttccagtttctattggctgttggtgttccctggcttgtggctgtaccactcccatctcagccttctcagctttcatggtcacattgcctcctcctctccatgtctctctctatgtgttggttttacaaaggtacatgtgattgtatttagggcccatctggataatccaggataaactcctttcaagatccttaacttaatcatattattcaccatataaagtaaaatccacaagttccagggattaagatgtgggcataactttttggggaccacaattcaacctattatagtaggcttaaaatcatagaaggatagacaacaggaagctgaaataaagctcaaagtgcaatatatcaagtatatgttagaagttaaacatgaagggaaaaagataaacagaagaggttttccaccagaagtagaacatttaaattagtgtatgtgcgtgtgtgtatgtatacatattttagttaaagaagtttgactatcttcatagtgtgagtgaaagaaacaagtaaaaaataagatactaaaaataagacaggcagcaggtgaatttagatgaaaaccatgagagaatagaaaataatttttaagagcatatggttgaccttaaaagcgggaacagtttttccttacaactagtagaaaatgaaaacagataatataaggaaaaatgacacaagaagagagcaattgaatttctgtttggtcacatctctcaatgtgtgaatcatctgaaagtgaactgatggaaatgaggttgagaatttgagaagagaggaaagagaatatggaagaatctctgtaagcaagagggaggagttaattatcaattcacttgagagcccaactgaggtaaaggtgagagtaaatttgaagagaatagtcatggttaagtgacaatgttgagcagcttaataggaagcatagagaaaatggattgtcagtgtaactgcgtgttggaggctaaaaagaatgttagaggagtaatataaataggtgaatgactctagagtgtctggaagggcatattttaaatggttgactatgtagtctaattatgtgaagaggtaaataaagaaatgtagggccagatagaaagaattagaagagaaatactatgttagtaaaagtaatggagcaggagaggatgatgagggtaagagaataccaaatactctgcctaaattttcagaggagagcagagctatggaaataaacccaacagtcatttcctatagagttgtgcacagaacaggccagataattattggagctatgatatatttttcattacaccatttggcctgggattttgtggcttggtagagatagttataacaatagataaaagtaagatcctcttcctcttttccttgctaaagatatgttaacatctttgtctagctgttgtttcttggaaaattaaagtcaatttaaatgacggcaaggttttactcagtgatgatgaagtaagatggagagagaaaatggaaactttaacctcctggttaaattctatttaaccaggacgccgattcgggctacaatgcgtggctttcgtatgaattgcagccggcggcggtaagttaaattctattaaatcaataggatattagttccaggcatattttataaaaacagaatccaaaaccttagagcattgttgtggctaaattattgtgtttatgcacatacacacactcacatacaaaatcccacacatattgactgaacactttcttttgaatataaatatcttatctacatctcaagtcacattgagggaaatttattaatatgatgtgcttattcaaaatctgatatatcagttaccaatatttttcaccttcaccgattttattcttatgtgattgttatgtttccttttggagtcaatggctgttgtgtgaggaggtcttgaaaaatattacaggaagaggacagtaccacaaaaacctacatgactatgcagaactaccgatcaattgtcccaaaacgagtgtcgaatattctttgtcttaaagttctgcatggaattcttacacatggaaaaataaatttgtggcaaaatgaaactcatcaaccaattgtcagctaatataaaatgttgagcagaatgcagtgatttgctgtttctgggaaggtaaacatttaatcttcaattacatatttgcagtgaaaatgtcaggaaatgcaaggggcaaaaaaatactacatcaatggaaaatatgaagactgagtcatacttacacttacacgttcatgcgcatggtgtcgctcttcactgagaacgtttccgcgaagaaagccgccgtttctttcttcctgcagaaaatatagcagaaagcggaatacctcttgcgaatccttccgcactaggaagccataaaaattgggccttgagagacagtttgaggtaaggcgttgtatatattgcagatagctctgaggtttttggagtgtaccatgctgtcttcctggcaaggaggcccaagaccgcggcaactactgctctggcttctgatcctcgcagcctgggagacgggtagtggccagctccactactccgtccccgaggaagcaaaacacggcaccttcgtgggccgcatcgctcaggacctggggctggagctggcggagctggtgccgcgcctgttccgggtggcgtccaaaagacacggggaccttctggaggtaaatctgcagaatggcattttgtttgtgaattctcggatcgaccgcgaggagctgtgtgggcggagcgcggagtgcagcatccacctggaggtgatcgtggacaggcctctgcaggttttccatgtggaggtgaaggtgagggacattaacgacaacccgcccatattccctgaaagcaagaaacgaataatcattgcagaatctagacctccggaaactcgatttccactagatggcgcatccgatgcagatattggagtaaactcggcattgacctaccgactggatcccaacgattatttcactttggacgcacaaaacagtcttgagcaaatgtcttcattatcacttgtactgaggaaaacactggacagagaggaaattcaggaacatagtttattactgacagccagtgatggaggtaaacccgagctgactggcacagttcagctgctcatcacgattctggacgtgaatgacaacgccccggaattttaccaatccgtttataaagtgacggtgttagagaacgccttcaatggaacattagtgatcaagctaaatgccacagatcctgatgatggtacaaatggagatatagtttactcatttagaaggcctgtatggcctgcagtggtatatgcatttaccataaatccgaacaatggagaaattaggacaaaaggcaaactagatttcgaagaaaagaaattatatgaaatatccgtggaggcagttgacaaaggaaatattccaatggcgggtcattgtacccttttggtggaagtactagatgtaaatgataacgccccagaggttaccatcacttctttgtcactccccatcagagaagacactcagcctagcgccattattgccctaatcagtgtgtccgatcgtgactctggctcaaatggacaggtcacctgcaccttgacgccgcatgtccccttcaagctggtgtccacctacaagaactactactcattagtgctggacagcgccctggaccgcgagagcgtatcagcctatgaactggtggtgaccgcgcgggacgggggctcgccttcgctgtgggccacggccagcgtgtcggtgggggtggccgacgtgaacgacaacgcgccggcgttcgcgcagcccgagtacacggtgttcgtgaaggaaaacaatccgccgggctgccacatcttcacggtgtctgctcaggacgcggacgcacaggagaacgcgctggtctcctactcgctggtggagcggcgggtgggcgagcgtgcgctgtcgagctacgtgtcggtgcacgcggagagcggcaaggtgtacgcgctgcagccgttggaccacgaggagctggagctgttgcagttccaggtgagcgcgcgcgactctggcgtgccgcctctgggcagcaacgtgacgctgcaggtgttcgtgctggacgagaacgacaacgctccggcgctgctgacgcccggggctggcagcgcgggaggcacagtgagcgagctgatgccgcggtcggtgggtgcaggccacgtggtggcgaaggtgcgcgcggtggacgccgattcgggctacaatgcgtggctttcgtatgaattgcagctggcggcggtcggcgcgcgcatcccgttccgcgtggggctgtacactggcgagatcagcacgacgcgccctctggacgaggtggacgcgccgcaccaccgccttctggtgctggtgaaggaccacggtgagcccgcgctgacggccacggcaacggtgctgttgtcgctggtggagagcggccaagcgccacaggcttcgtcgagggcgtcggcaggcgctgtgggtccagaagcggcgctggtggatgtcaatgtttacttgatcattgccatctgcgcggtgtccagcctgttggtgctcacgttgctgctgtatactgcgctgcggtgctcggcaccgcccaccgagggcgcgtgcgcgccgggcaagcccactctagtgtgctccagcgcggcagggagttggtcgtactcgcagcagaggcggccgagggtgtgctctggggagggcccgcataagacggacctcatggccttcagtcccagccttcctccttgtctgggttctgcagagggaacaggccagagggaggaggactcagaatgcttgaaagaggtaagcttatattttaaaaaattgtcttagtaaacactttagccttccttgcagttgtttgtttaagacatctttcctgccaatttcaaattattctttactttaattttaattttgctagttgttatcgaatttaacaactctgctgtggacattatgtgttggattatccttcagagtgaaatcttaactcacaaaccataatgaaatgtgcaaaacaagaatattttgtttctgttgtattcttaatagttctaagtatttatcttgcaattgagcatttacaaaaaattcctcacgttgtgagaacttaaacatttagaaaatgtttgttttaatgaggctaatcgtaatcttaaatttaaaaaatttttagtttaatgtatacatatacccacaagatattattttaaagagccccataacttttcacataaatgctttttttaagtgcacttttctttctttctttttttaaactgttttgattgtctctacttttttgtcctctaggcacatcagtgttcccctctcatatatcccatgaaaaatatcttgtgattctgctttcaattttttatttgcattcagataattactcatacatatatatatacatatatagagagagacctggtaggctttttgttattatttcttttccaaagtttgaagggatttccaaaaggtactggtgactgaaagtaccttttggcagtccctgcaaatctaatggttttaatagctgtgtagtattccacagtgtaagtgtgcaattatatattatttacctaatgatgggcaatcactttgtgtcaagtgttctgttatcttcatgaaccatgctgtgctatcatttcatatatttcccaaaatattggtgttatttctacgaaattgattgtcagatgtggaattgatgcatcaaagatattaataattttaattataaaatatgtcactggattgccttccaagtattttggaaccaaccagttatgagcactctttctatctcaagaagcaatagtggttttactttctgctaatgtgatctctgtgaaatgatatttcactgttactttaattttaaattcctgtatagtattagtgaatttgagcatattgtcatatgtattttgttgatttgtatttgatcttctttgatttatccattaagttatttgcctacttttctattgaaaaaaaatttttagtttcagtttggaaaagttctctgtaccttatagatattaactgtttatctattttttgacatttttaattaaaatttttattttgagataattatagattcgcatgtggttgaaagaaatagtaaagggagatgctatgtattcttcactaagttttccccaatagtaacatcttacaaaagcgtagggccataccacaacctggatattgacattgatacagtaaagaagtaacatagttccgtaacaaccagattcttgatatcacctttttatagccacatctgcttccctgcctaatgctggcaagcagtaatctgttctccatttctctaattttgttacttttacttcagaaataaataaaagtatctctatttatagataaaattttttaaaattatttttatatttatttattttttattacactttaagttctgggatacatgtgcagaacgtgcaggtttgttacataggtgtacatgccatggtgtgcttatctattatctgcatcacaaatatgttttcctcctatattatttctattcatttgtttgtactaattttgtcatatataaatgtttttaaaatgtatgaattaaaatatatctttttccttttatggattttaaggtctgcatattcagttagaaaggtcttcccagctgggcacggtggctcacgcctgtaatcccagcactttgggaggccaaggtgggcggatcaggagatcaggagtccgagaccagcctggccaacatggtgaaaccctgtctctactaaaaatacaaaaattagcgaggcatggtggcacgcgcctgtaatcccagctacttgggaggctgaagcaagagaattgcttgaacccgggaggtggaggttgcagtgagatgagatcatgctactgtactccagctctgggtgacagagcaagacttcgtcttgaaaaaaaaaaaaaaaaaaaagaaaggtcttcccaactcctatattgaacattcattaattaaatgcatttaataaatacttattgagtgttctctatgtgccaggcatgttctacacattagacatttagcaacgaaatttattattttgtaaatccaaatttccagttggtatcactttcctactgcctgaaaaatttctttaatattttttatagtgcatatgttctggcaacaaattcactcagcttttgtctgagaaatatctttatctctttttttttttttgagacggagtctcactctgtcgcccaggctggagtacagtggcgtgatctcggctcactgcaagctccacctcccgggttcacgccattctcctgcctcagcctcccgagtagctgagactaccggcgcccgccaccacgccctgctaattttttgtatttttagtagagatggggtttcatcttgttagccaggatagtctcgaactcctgacctcgtgatccacctggctcggcctcccaaagtgctgggattacaggtgtgagccaccgcgcccggctctttatctcatttttatttttgaaaaagtattttcactgggcatagttgacagttttttaaaagatataattcagttgtcttctggcttgcatagtttctaataagatgtttgcttttttatatatgagtcttcctctccccacccctcatggttactgttaaaacttttctttttatcctgacttttgcagattgattgtgatgtgctttagtatggttttctttatgttagtctgttggggtttgttgatattcttggatctgtggatttatcattttcatcaaattcaggaaaaaatcaaccatacttcttctaatagttttttctttccttccatcctttctgagactccagtaacacatatgttacaatgacacaggtcattgaagcgttctttatttttgtccatttctttctctgtgcctcattttgaatatcttttattgacatattttccaagttcactaatttttccttttgtagtatcatatctgttaatcctaaacagtgtattcttcatttcagagaccatatttatttcttatctgtataagattctttttgtctcttttaaaatttattttacatgtctccaccgaatagtcatctttttatctatatgtttgagcatattagtacatgtataatagatgttttaactttcttgtctgctaatttcaacatttttgtccttagtttgcttcttttaatctatcttcttctatggatatattttcttgctgttttgcatgactggtaatctctaataagatgctagacattgtgaattttacattgtcggatgctggattttgtgtgtgtgtgcatgtgtgtgcgtgttcctttaaagcagtagttcttgataagaaacagttttgtcccctctaccccctacccaggagataatttggcaatgcctggatacatttttggttattacaactagggaattgctactggcatctaataatggagctctgagatgctgctaaacaccatccaattgctgccaaacatcctaccgtgcacaggacagccgcccaacaataaagaattagctcaaaatgtcagtagttccactgttgagaaactctgctttaaagagtcttggacttagttctgacgtgaagttaagttgctcagtaccaatttattcctttcaaggcttcattttaagatttgttagtacacattcagagcagcttttagtgtagcactaattcggccttctattacagcaatactttcctgaggacaccacctaatgccctgtgcattaagaggtctctcttctctgattggtaggaatgtgaaatatttccagccctttgtgagctctaggaattattctacccacttttttttttaattttgaagggatagcctgatctggggaggttgatcagtgatctgtgatctgtgatcacatcactccactgcagcctggtgacagagtgagaccatgtctcaacataaaaattaaaacattagaattgaggtttaatgttatcaaatattttatctgcatcttttgagggaggtataaattttttctttggcaatgttaatgtgttgaatttatgatttatgattttcttatggcaaaccaacctctacttccttggataaccgtaatttgattataatttataatccttttaatatactacttattttgttaaattttcaaaacaattttttcatctttattccaggtgatactgatatgtcctagtttttcttcctaatttcttctttgttaagtattcaagttataaataagaatctagcataacttgaatacttaacaaagaagaatagtctttgaaaacttccagaaaattttctgtttcctgtaaaagtttgtataatctttgaattacttcttatttgattggagaactcactgttgaagttatctgtatcaggattttgattggtgggaatatttctgattactgactcaattttaatagtataaggaccattcagagtttaatttactcgagtcagttacgtagataatattttttcaggtattttcctgtttaatctaaattttcagttatatgctcatactttctacagaatctatagtgatatttccctttccattcttgatattatttttgcttcctgtctaatttacttttcttcagaattctgctttctgatttttgtttttgctttgaaatatttttatattaattatactgattcatttctcttcttttcatttgtgtttgcaggagatgtcctcttcccagccttttattttaaaccttttagtattatgggcatattccacaagttctttgctactgtctcactgagtagcagagtctaatttttctttccttgaactttgactggtcttaatattggaagtaacattctgggatttatgaagtcaggtcataagaagtcttacagtatgctttggtctctgagaatatttgttttgggggaagcctgccaccatgtaagaattctgactaccttgagattgtcatactgtaaagaagctcaagctggacttgtgagaagccaaatggatagaaaaattactatccagtctccagttgtcttagctttccaagcttaggtgccagaaaaatgtagaaggcttcaggtgactgtagtgtgttggagctggctcttttactggcttatgagaactgataatgcaaatttattcccaactctggattcaatgatgtcactttggtagcttgaaattggccatggtaggagtatttctgccacagaaataggcaaatgctacaaaacagagttttttgtttttcttttttcccagagacctagttgttaagcatttaccagtacactactgcacctgattgcaagcaagaaccactcagttgagtcagaaccaggagaggtaatattaagttgttttaagatattaggtagttgggatggtttactatatagcaatggataacctgaacaagtactctttcttagataatctataaattttaacttgaatatttatttagtttatatttacaatacctagtgatatctttaggcacaaatatttcaattttttgtgcgttatttttgtctcaccatttttatgtctctatttccttcctttgttgatcttcttttgaaatgactgagtactttttattgttccatttccttctgtattatttggaagcccttttccgaatagctagtgcttaccctagaaaattaagcatgtatccttgatatatcaaaatcaaaagttaactgaaacccttcctccttctgggaaatgcagggaccttacatttttaaaatctttttaatcccttttgacttatatactatttctgtcatgctttaaaaatattttaaaaccccataagatattagtattattttatacaatcaacattgttttaaatgtacttacatatttaccagttttgtttctcttccttacttcttgcccctctgacctttcatcagggattattgtctttccatgttagaataatttgagagtttcctttagtccaaagatgctggtgaggaatgatttcaggttttgtttttctgaaaatgtctttatttcatcataattattgaaaagcattttttctgagggtataatcttaggtgtgacccccacagcacatagtaaatattattccagtgtctactggtttccattgttgctgtcaagaatttagctgtcaatctaaatgtcattcctttaaaggtattctgtttattttcctttggctgcttttcagattttctgtgtgtctgatattttgcagttttaccatgctgtgtctttataatcatcctgttctggattcagtaggattttttttaatttttaatttttccgtaagttattgggggtacaggtggtatttgattacatgagtaagttctttggtggtgatttgtgagattttggtgcatccatcacctgagcagtatacattgcaccatatttgcaatcttttatccctcgccaccccccactcttgcccccaagtccccaacgtccattgtataggatttttgaatttgtgaattaatgcctttacatcactttgagcatatcctcagctataatgttctccaatgttgcttctgttccattgtatttctatagtattattttagtactctaattaaacatattttaatcttattactctatcccatctatttctaccttttattttaacaccttttgctctttgggctttattgtggatagttcacccaccttaaagtttaataattctctcttcttgctgttgtctgaatttgtacccccaaattcatgtgttgaaaattcaatcccttatacaacagtgttgggaggtggggaatttcaggaaatgtttagattatgagggatctgccctcatgaataaattaacggcactgtaaaaggacttgatggaaggagcctgtccctctcttatgcttttggctctgtcatgtgacgatgcagcaagaagatcttcaccagatgctggtgccttgatcttggacttcccctaggctccagaattgtgagaagtaaatttccgttctcataaattactcagtctgtggcattctgttatagcagcacaaatggtctaagatacttttatttattctttttcaaatttattgttactttgtataatttctagtttcctctcgaaactttcaagcttggcatttatatctggaacacaataagctcatggttttagcgtctatttctgatatgtccagtaactgggatcctcatgggtctattcctgtggtgtgttttaaaattgtatctttatggtgttttgtctccacataaacctggttatctttgattttgtgctgaaagttgtattaaacacttcttcctggaaataatttggggcttataacattttctttctccagaatggattttaattgacttttgccaggcatcttggggcactagcaatcatgggtaatcttaatctatttcaagcttcaggtattctagataaaacctcattatctaaaatttacatgtattctttaagtacggttattcagtttcctagccaaacatgagagattgtttaagaagttccaccatgactggtagactcaggattctgacttttgtttctctagtccttggagactgtcaaaagtatatctcagtattcattcacctatttttttccttttatttccagttggtacataataattgtacatatttataggatacagagtgacattttgatacatatatacaatgtataataataaaatcagggtaattagcatattcataatctcaaacatttaccatttttgcatggtgaacatttaaaatccactcttctagcttcttgaaaatatgtaagaaattatagttaaccatatttatcctacagtgctacagtgctgcaaaacaccacaacccattcctcctgtgtagctataatttcgtatccattaaccaacctttccccatcctccttttccttcacccttcccagcctctgataagcacaatactacttccatgagctcaataaaattttgtagctgccgtataagtgagaacatgtatttatttttctgtgcctgacttatttcacttaacatatgccctccaggctcagccatactgccatgaataacaggatttcattcttttttatggctggataatattccgttgtgcatatacaccacattttctttatccactcatctgttgatggatattgaggttgattccacatagtagctattgtgaatagtgctgcagtaagtatgggaggtgcaggtatcactttgacatactggtttccttttctttggataaatgcccaatagtggaattgctggatgatatggtagttctatttgtagttttttgagggactcccatactgttttccttagtggcagtgctaatttacatgcccaccaacagcatttatgggacagtggctcatgcctgtaatcccagcacttagggaggcagaggcaggaagatcgcttgaagccaggagttcaagaccagcctgggcaacatagcaagaccctgttcttcacaaaaaagaaaaaaaaagcagttgtagaactcctttaagtatttcttgtaggacttatctagttgtagtgtacttcctcagtttttgcttgtttgggaaatactttatttctccttcatttctgaagtatagctctgcttggtatagtatttttggctgatagttttaaaaaatttcagcactttggatatatcatctcattctatcctagcctgtaaagcttctgctgagaaatctgctgttagtctgatgggaattttcttataggtgacttgtcacttttcttttaccgtttttagaattccctccttgtcttgagtctggtaccgtagactactcagccatcctgatgccctacctcttgtatagaaacaacccagatccaaagtggccagaaagttactttaccttctgaatttgtggtctttttcagaatctctacctgttaattctgcatgactttattagtcattagatacttttataattttaaaatatctccaattgtatggttggttcaaattaccagttctgcatactggtaatgtaagtcctctgttgaattgatttttaaatacatttattttattccagtatcttctagctcctggtgttgcagatgagaagtttcaaataacttgaaataattcccttctatgtaattatccctgattttgactttctttccatagttatatattttttctatgctattatattctcattttaaagatgttgaatgacaatgtaattttcttttctttacaagtggtagcttatttacaagtatttttgaagtttattttcctggaaagttttcttaaattatagattttagtatttcttctgttttattacttcagatttcttcttcaatggctccaattatatttgtattagatattctttgcttttcttttgtagctaacactcctaaatcctacctagctcttttttaaaaaatattttactttttattcttgttttcatcttatagttttctttaggcattatccatagtgtttatatgctgttatgtgccttctggtttagtgtttacttctgaaaaaattattttccttttttttaatattttactgagttttctcatctctcttttcaaagcttttcttctccaatcatatcattactgagtctctctaattctgatttgtgtattcttgcatagcttttcattattttctaaaaatgtttaagttgttttcaaatattacgtagcaatttgtggaattttttttcttgtgtgtatttatttcctttagtgtaattatttgtcctctcctttaaaaataattttatatcagatttgcccataatccttttcttatgctcatttttatatgaaaagtgctcccccataattttagaagaaacagaccaggataattttcctatctttgttgctctatagatttctattcagctattgtcatgaaatgataaaaatataattttttaatgtcttactttgtgacatcctttaccctttttacttggacctttttcctttgtttaattgtcccccacccacaccattctgcttcatatggactcaattcctatcagttcctcctcagtataggggtttttgctacaagaagacatttgttagttgacaagttcatagggctaagacaggtttagcacaatccaatctatttgtagtcccttctgctaagttttgaatttgcttttatttctaatattttactgagttttctcatctctcttttcaaagctttcttttttttcttactcagggataattgaattaggaccttcgatttccccccttccacccatgactattgttctcaaattgttttactatgctttccagtgagtacttattggcactttttggagttcttcaattctcaacaccatcaaaagccccataaccttcttttgcttcctcctgagactcttttcatgtgcttattggtcatttctttatcctcttcggagaaatacctattcagaacttttgcccaatttttaattggtttattcgtttttcaattgttgagttgtaagagttctttatatattctagatgcaattactttattagatatataatttgcaaagattttctcattgagggtgttgtcttttcacattcttttttagctcccacttataagtgagaacatgtagtatttggttttctgtttctatattaattcacttgggataatggcctgcacctccattcaatgggctgcaaagggcatgatctttttctttctttatggctgcatagtattcaatgacgtatatgtacaatactgtattgtattgtattgtatttttttcagacaaagtctcactcttgtaccccaggctggagtgcaatggcgcgatctcggctcactgcaacctccgcgtcccgggctcaacaattatcctgcctcagcctcccgagtagctgggattacaggtgcctgtcaccaggcctagctaatttttgtattttaagtagagacagggtttctccatgttggccaggctggtctcgaactcctgacctcaggtgatccgcctgcctcggcctcccaacatgctgggattacaggcgtgagccactgtgcctggccaatgtactgcattttatttatccagtgcaccattgatgggcatttaggattattctctgtctttgctattgtgaatagtgccatgatgaacatacacatacatgtgtctttatagtagaatgacttatattcctttggttatgtacacagttatgggatttgctggcttgaatggtaagttctttgagaaatcttcaaactgctttccacagtggctaaactaatttatattcccgccagcagtgtataagcattcccttttctctgcaacctcaccagcatctgttatttttgactttttagtaatagccattctgactggtgtgactgcaacctccacctcctgggttcaagcggttctcctgcctcagcctcctgagtagctgggactgtgcaggcacacaccacaaagcccagctatttttcttttttttttttgtattttaagtagagatggggttttgacgtgttggccaggctggtctcgaactcctggtcttaagtgatccacctgccttggcctcccaaagtgctagtattacaggcatgagtcactgtgcccggccctttgcccattttttgatgaggttgtttgttttttgcttgttaatttgtttaagttccttatagattctggatattagacctttgttggatgcatagtttgctgatattttctcccatcctgtaggttgtctgtttactctgttcatagttgtttttattttttaattttatgggtacataataagtgtacatatttatggggtatatgagacattttgatacaagcatgcaatgcacaataatcacatcatggaaaatggaatggccattcccttaaacatttattctttgcacaaacaaaccagttatgctcttttagttatttttaaatatacaactaaattatttagaccatagtcaccctattctgctgtcaaatactatgtcttattcattttttctattttttatcctcattaaaaatctccactttctgtccacaccccactaaactttctagcctttgttaaccattcttctactgtctatctccatgggttcaaaaaatatatttttttattatactttaagttttagggtacatgtgcacaatgtgcaggttagttacatatgtatacatgtgccatgctggtgtgctgcacccattaactcgtcatttagcattaggtatatctcctaaagctatccctcccccctccccccaccccacaactgtccccagagtgtgatgttcccttccccttcctgtgtccatgtgttctcattgttcaattcccatctatgagtgagaacatgcagtgtttggttttttgtccttgcgatagtttactgagaatgatgatttccaatttcaaccatgtccctacaaaggacatgaactcatcattttttatggctgcatagtcttccatggtgtatatgtgccacattttcttaatccagtctgtcattgttggacatttgggttggttccaagtctttactattgtgtatagtgccacaataaacatacgtgtgcatgtgtctttatagcagcatgatttatagtcctttgggcatatacccagtaatgggatggctgggtcaaatagtatttctagttctagatccctgaggaatcgccacactgacttccacaatggttgaactagtttagagtcccaccaacagtgtaaaagtgttcctatttctccacatcctctccagcacctgttgtttcctgactttttaatgattgccattctaactggtgtgagatggtatctcattgtggttttgatttgcgtttctctgatggccagtgatgattagcattttttcatgtgtcttttggctgcataaatgtcttcttttgagaagtgtctgttcatatcctttgcccactttttgatggggttgtttgtttttttcttgtaaatttgtttgagttcattgtagattctggatattagccctttgtcagatgagtaggttgcgaaaattttctcccattttgtaggttgcctgttcacgctgatggtggtttcttttgctgtgcagaagctctttagtttaattagatcccatttgtcaattttggcttttgttgccattgcttttggtgttttagacatgaagtccttgcccatgcctaagttctgaatggtaatgcctaggttttcttctagggtttttatggttttgggtctaacgtttaagtctttaatccatcttgaattaatttttgtataaggtgtaaggaagggatccagtttcagctttctacatacggctagccagttttcccagcaccatttattaaatagggaatcctttccccattgcttgtttttctcaggtttgtcaaagatcagatagttgtagatatgcggcgttatttctgagggctctgttctgttccatttatctatgtctctgttttggtaccagtgccatgctgttttggttactgtagccttgtagtatagtttgaagtcaggtagcataatgcctccagctttgttcttttggcttaggattgacttggtgttgcgggctgttttttggttccatatgaactttaaagtagttttttccaattctgtgaagaaagtcattggtagcttgatggggatggcattgaatctgtaaattaccttgggcagtatggccattttcacgatactgattcttcctacccatgagcatggaatgttcttccatttctttgtatcctcttttatttcattgagcagtggtttgtagttctccttgaagaggtccttcacgtcccttgtaagttggattcctaagtattttattctctttgaagcagttgtgaatgggagttcactcatgatttggctctctgtttgtctgttattggtgtataagaatgcttgtgatttttgtacattgattttgtatcctgagactttgctgaagttgcttatcagcttaaggagattttgggctgagataatggggttttctagatatacaatcatgtcttctgcaaacagggacaatttgacttcctcttttcctaattgaataccctttatttccttctcctgcctaattgccctggccagaacttccaacactatgttgaataggagtggtgagagagggcatccctgtcttgtggcagttttcaaagggaatacttccagtttttgcccattcagtatgatattggctgtgggtttgtcatagatagctcttattattttgagatatgtcccatcaatacctaatttattgagagtttttagcatgaagggttgttgaattttgtcaaaggtcttttctgcatctattgagataatcatgtggtttttgtctttggttctgtttatatgctggattacatttattgatttgcatatattgcatcccagggatgaagcccacttgatcatggtggataagctttttgatgtgctgctggattcggtttgccagtattttattgaggacttttgcatcaatgttcatcaaggatattggtctaaaattctcttatttggttgtgtctctgcccggctttggtatcaggatgatgctggcctcataaaatgagttagggaggattccctctttttctattgattggaatagtttcagaaggaatggtaccagttcctccttttacctctggtataattcggctgtgaatccaatattttgttttgtttttcctttttgagacaggtcttgctgtgtcacccaggctggagtgcagtggtattaacagaactcagtgcagccttgacatcctgggctcaagcaatcctcctgcctcagcctcctgaatagctgggaccacaggcatgtgctgccatgcccagctacttttttgattttttttgtagagatgaggtctcactttgttacccagtttggccttgaattcctgggctcaagtgatcctttaacctcagcctccaaaagtgctgcagttacaagcatgcgccaccatacctggccttgttttgatttttaggtaccacaaataagtaagaacatacgatatttgtctttctgtgcctggtttatgtcacttataatgacatccagtttcatccaggttgttgcaaatgactggatcttgttttttttatggctgaatagtactccattgtgtatatgtaccacactttcttttctgtttttttagacagtctcacttttgtcgcccaggctggagtaccgtggcgcaatcttggctcaccgcaacctctgcctcctgggttcaagcgattctcctgcctcagcctcccaagtagctgggattataggcacgtgccaccacggccggctaattttttatttttagtagacacggagtttctccatgttggtcagactggtctcaaattcccagcctcaggtgatctgcccacctcggctttccaaagtgctgggattacaggcgtgagccacggcaccggcccattttctttacccgttcatctgatgatggacatgtagattgcttccaaatcttggctattgtgaacactgctgcaatgaacaatgggagtgcagttatctcttcaatatactgatttccgttcttttggaaagaaaggaaatcctacctagcagtgggatttctggatcacttggtagctctatttttggctttttgaggaaactccaaactgttctccatagtgcttgtactaatttacattcccaccaacaatgtacaaagtttccctttttttcacctctccagcattttttattgcctgtcatttggataaaagccattttaactgtggtaagatgatatctcattgtagttttgatttgcatttctctgattatcagtgatgttgagtatcttttcctatacctgtttgctattagtatgtcttcttttgagaaacatctattcaactcttttgcccattttaaaattagattattagatttttttttctatagagttgtttgagctccttctacattctggttattcatcacttgttagatgggtagattgtaaatattttctctcaatctgtgggttgtctcttcactttgttgattgtttgcttttctgtgcagaaggtttttaagttgatgtgatcccatatatccatttttttcctttggttccctgtgattgtggggtattactcaagaaatttttgcccagactgatgttccggagagtttccccaatgttttcttgtagtcgttttatagtttgatgtcttagatttaagtctttaatccattttaattcaatatttgtatatggtgagagataggggtctagtttcattcctctgcatatggatatctagtttcccagcacagactgtcttttctcgagtttatgttcttggcaccttcatcgaaaatgagttcattatagatatgtggatttgttttttggttctctattctgttccattcatctatgtgtctgtttttatgccagtgccatgatgttttggttactatatctctatggtataatttgaagtcaggtaatgtgattcttccggttttgttctttttgctcaagatacctttaggtattatgggtattttgtagttctatatacattttcagattgtcttttctatttctgtgaagaatgtccatggtattttgacagggattgcattgaatttgtagattactttgggtagtatgaacatttttacaatattgattcttccagtccataaacatgcaatatctttccatttttttgtgtcctcttcaatttctttcatcagcattttatatttttcattgtggagatctttcacttctttggttaattcctaggtatatttagttttattcgtggctatcgtaaatgggattactttttaatttcattttcagattgttcactgttgggacatatagaaatactactaatttttgtatgttgattttgtatcctgcaactttactgaatttattgttttaatagttttttggagtctttagatttttttaaaactgagattatatcatctgcaaacaaggataatttgatttcttcctttctaatttggatgtcctttatgtcttctctctctctctctttcttttttttttttttttttgagatgaggacttgctttgttgcccaggctggtctcgaactcctgggctcaagcaatcctcctgcctcagcctcccaaagtgctgggattacaggtgtaactcacttcgcctggcctaggaagccctttatttctttctcttgtctaattgctctagctaagagtactatgttgaatactatgttgaataacagtggtgaaagtgggcatccttgtcatattctagatcctagagaaaaggctttgagtttttgcctgctcagtatgatactagctgtgagtctgtcatatatggtttttattatgttgaggtatgttccttctatacccagatttttgagggtttttaagatttcaatagttttgggaaacaggtcgttttcagttacatgggtaagttatttagtggtgatttctgagattttggtgcacctgtcacccaagcagtgtacaccgtacctaatatgtgtagtcttttatctttcactcccctcccacccttccctccaagtcccccaaatccattatatcattcttatgtctttgcattctcatagcttagctctcacttgtatgtgagaatatacaatatttggttttcgatttctgagttacttcacttagaaaaatggcgtccaggtccacccaagctgctgcaaaagctattattttatttagtttatggctgagtagtattgcatggtgtatatataccacattttctttatccacttgttggctgatgggcatttaggttggttccatatttttgcaattgtgaattgtgctgctatcaacatggcttgcacatgtgtctttttcatgtaatgacttcttttcctttgggtagatacctgatagtggcattgctggatcaaataatagctctacttctaaatctttaagaaatctccaaactgttttccatagtggttgtgctggtttacattcccaccaatagtataaaagagtgtccttttcaccacattcatgccaacatctattactttttgatttttaaattatagtaattcttgcaggagtgaggtagtgtctcattgtgcattaggaaatttagtatacaataaagacagcatttttattgaggaaaggatgcattttaaaaaacaagtttttcaaaaatatagggaggattgtggttacttctagaaacagtagtgcagtcaggaaaaattcagcacaatatgtatcagtggaattcatctgatcaaacttaaaatattattccttgcattatagttctgagcaggtaccatagataatagttctattgtgttgttcactttaaactagagcaagaaacttttctaataagtggaattgggagctgtctagctggtgttggcctgataaatgcttaatacacatgaatgtgcatgcatatgtatgcatataccatatacatatattataaatttaactgatataaaagatgtttggtaaatagtttaaaatagtaataaaatatacaattctccctattatcaattattacagaatgtttcccttgatttttgctgaacttttctatccataaactatctatggttgtaattgacaagtatagttctcacatgaatgtctgttggtattttcatttatcttaacaaataatatagagtaaaatgacaaagacattgaatcttgacctgtttgtcaatgatgtgacttccttgctgcattggataatacctcttaaatactggaaaattatttgttgatttttggtctattcacaatgtaacagctacaaatatgatacactttaaaaaataatggtataatttaactttttaatttttttatttcaatgggtttttggggaacagtatttggttacatgaataactactttagtggtcattgctgagattttggtgcacccatcacccgagcagtatacattgcacccagtttgtagtcttttattcctcacccccttcccaccctttccccctaagtccccaaagtccattgtattatacttatgcctttgcatcctcatagcttagctcccacttatgaatgagaacatgtggtgtttggttttccattcctgagtttcttcacttagaataatggtctccagttccatccaggttgctgagaatgccattatttcattcctttttatggctgagtagtattccatggtgtattatatatataatacatatattttatatatatgtatattacaatttctttatacacttgttgattggtggctatttggtctgattccaaatttttacaattgtgaattgtgctgctataaacttgtgtgttcaagtatctttttcatataatgacttttttttcctctgggtagacacccagtagtgggactgctggatcaaatagtagttttacttttagttctttaaggaatctccacactgttttccatagtggttgtactagtttacattcccaccagcagtgtaaaattgttcccttttcaccacattctggccaacatctattatttttttattatgaccatttttgcaagaataagatggtatcacattattgttttaatttgcattttcctgataattagtgatgttgagcatttttttatatgtttcatatcttcttctgagaattgtctgtttatgtccttagctcactttttgatgggatttgtttttcttactgatttgtttgacttccttgtaggttctggatattagtcctttgtctgatgcagaatttgtgactattttctcccactctgtgggttgtctgtttactttgctaattcttttctatgcagaagctttttagtttaattaggtcccatttatttatttttgttgtagttgcactttcttttgggttctcagtcatgaattgtttgcctaagccaatgtctagaagagtttttctgctgttatattttagaattttcatggtttcaggttttagatttaagtctttgatccatcttgagttgatttttgtgtaaggtgagagatgaggatccagtttcattcttccacatgaggcttggcagttatcccagtaccatttcttgaataaggtgtcctttccacactttgtgtttgtatgctttgttgaagatcagttggctgtaagtatttgactatatttctggttctctgttctgtttcataggtctgtgtgcctatttttataccagtaccatgctggtttgataactacagccttttagtataatttaaagtcaggtaatgtgatgccttcagatttcttctttttgttttgtattgccttggggatgtgggctcttttttggttccatatgaactttaggattgtgtttttctagtcatgtgaagaatgataatgatattttgctgggaattgcattgaatctatagattgcttttgacagtatggtcagtttcacagtattgattcctgtcatccattaacatggaacatattccatttgtttgtgtcatttatgatttccttcagcagtgttttgtagttttccttgtagagatctttcacctccttggttaagtatattccgaagtgtattagtcagggttctctagagggacagaattaataggctagatgtgtatataaaggggagtttattaaggagtattaactcacacaatcacaaggcccaacaataggccatctgcaagctgaggagcaaggaatccaatctgagtcccaaagctgaagaacttggaatccgatgttcaaggggaggaagatccagcatgggagaaagatgtaggctgggaggctaagccagtctaatctctccacgttcttctgtctgcttttattctggctgcactggcagctgattagatcgcacccacccagactgagagtaagtgtgtctttcccagtccactgacacaaatgttagtctcctttgataacaccctcacagacacacccaggaacaatactttgcatccttcaatccaatcaagttgacactcagtattaaccatcacaagtcctccccttgtcaacttgaacccatacacacctcctgaaattatagataatcttcaaattaagacaataataaggtcataattattcccaacatgatacaactatccttcatacaaccaagaatgcaccaattcccaacccaaatgctattacataaagttaacatttaaattttcatatgaagtcaataaatcttatgtcacatgataaacaagaaaggaaataaaatgaagatattttcttagtacaaatgtataaatgcacaaacatgtttttaacaaagaaggaggaaatactcacgacaattaaaatcctcatttctgcaactggttgtgtggttcatagctggtattgatgactaccttcctctactactcattctgtattccctttgccttcagcaagcacctcagcaggtagtggttttttcctggtgtagtgacccaaaccttcattcctgaaggatctgggccatttgtagtcctgcctggattgtgctgttgtagtttcccattgacacagggcatggtaatactaagagacaccctaagggatcttgtgtattccatgcatactcttccttacctccactgtggagtagtagactgatttcatcttgagagtctgggtcagtcaccccagccaacactgtaacttccttcttagattgttggtttaaaggtaggaggagcccaaaaagtgtcccggtgtcaatcttaatttccagtttaatggaatcgtggttgtgtcttctggtggcagcattcctccctctggaactaagacctctaggccagcagaacataatgtcacagggacagtaagcaaaaattttactagtgggtcactaggggtgatggtaagtggtgccacttccacttccaccccttgattcctggacctgtgaattccggctatgggagaaacagtaccatatattggatgctgattcagagcatacacaaccttctggagaattttgccccagccctgcaaagtattgtcacctagttgacattgtaattgtgacttcaaaaggccattccatcattctatcaatccagctgcttcaggatgatggggaacatgtaaagaccagtgaattccatatgcatgagcccgctgctgcacttctttagtcgtaaagtgagtgccttggtcaaaggcaatgctgtgtggaataccacgatggtggataaggcattctgtgagtccacagatggtaatcttggcagaagcaatgtgtgcaggataggcaaacccatatccagagtaagtgtctattccagtgaggacaaatcgctgccctttctatgatggaagaggtccaatataatcaacttgccaccaggtagctggctgatcaccctgaggaatggtgccatatcaagggctcagtgttggtctctgctgctggcaaattgggcactcagcagtggctgtagccaggtcagccttggtgagtggaagtccctgttgctgagcccatgtgtaacctccatccctgccaccatggccactttgttcatgggcccattgggtgatgacaggggtggctggggaaagaggctaagtggtgtccacagaacgagtcatcctatccacttgtttattaaaatcctcctctgctgaggccagccgttggtgagcactcacatgggatacaaatatcttcacagtttttgaccactcagagaggtccattcacataccttttccccaaatttctttgtcaccaattttccaatcatgcttcttccaagtccttaaccatccagccaaaccactggctacagcccattaatcagtatataattgcacatccggccatttctccttcatgaaaagtgcacaaccaggtgcactgattgaagttctgtccactgggaagatttcccttcactgctgtccttcaggtatgtcctaggaaggggctgtagtgctgcagctgtccactttcaggtggtggacatatcatgcagaaccatctgtgaaccagtccttagtcttctcttcctcatcaactgatcatagggaactccccatgaggccattgttgcaagctggggaagagaaggaagggcggcaggagtggagaccatgggaatttgagccactacctcatgtaacttacttgtgccttcaggacctgctcgagcccgatcacatatataccacttccatttgatgatggaatgctgctgtgcgcaccccactttatggctagatggatcagaaagcacccagttcatgataggcagttcaggttgcttggtgacttgatgacccatagtcaaatgttcagtttccaccaaagcccagtaataggccaagagctgtctctcaaaaggagagtagttagctgcagaagatggaagggccttgctccaaaatccttgaggtctccactgtgattcacttatgggggcctgccaaaggctccaaatagcatccctatctgccactgacacctcaagcaccattggatctgctgggtcatatggctcgagaaacagagcaacttgcacacagcctggacgtgttgtagagtcttctcctgttctgtactacattaaaaagtgagagccttttgggttactcgataaatgggctggagtaacatacccaaatgaggaatgtgttgcctccaaaatccaatagtcccaaataagcctctttcgtggttgtaggaggggccaaatgcagcaacttatccttcaccttagaaggaatatcttgataggccccactccactggacccctagaaattttactgaggtagaaggttcctgaattttagtcatttattttccatactctggcatgcaaatgtctcaccaataagcccagtgtgtttgctacttctcactcactgggtccaatcagcaaaatgtcatcaaggtaatgaaccagtgtgatatcttatggaagggaaaatcaatcaagttctctccaaacaagattatgacacaaagccggagagttgatatacccctgaggtaggatggtaaagatatattgctggccttgctgactgaaggcaaattgcttctggtgggccttatggacaggaatggagaaaaaggcatttgccaaatcaatggttgcataccaggtaccaagagatgtgttaatttgttcaagcaatgaaaccacatctagtacagcagctgcaattgcagttaccatttggttaaacttatgataatccactgtcattctccaagatccatctgtcttcttcacaggctaaataggagagctgaacggggatgtggtgggaatcacaacccctgcacattttgagtccttgatggtggcactaatctctgcaacccatccagagatgtgatatgttttttgatttactatttttctaggtagaggcagctctaattggtcttcctattttgtcttttccatcataatagccctcactctaccagtcagggagccaatgtgggggttctgctagctgctaagtatacctatgccaattatgcattctggcactggggaaatgaccacaggatgagtccagggacccactggacccactctaagtcagacttcagctaaaactccataagcccctactttaactggaggaccaccaggacgttttcggtcccctggagtcaacgtcagcttagagacactgttcagtagtccctgaaatggcaatcatttccctttccccaatcacagttactctggtaaaaagccgtaggtctccatggggaaggatgggagaaagactaacagcataaattgttgtcagtgtcatccttgtatccctgggataaatcccacttggtcataataagtgatcttttaacagcgtaaattgttgtcaaggggaaccagcctccccttcatttaagggattctaggtctgtaaactggtttaagtctggaaattgattgaggggaaattgatcctctgtttttataattcaaattagtcttttgtccacttgacctggaagttttctgcttatataaattaaataagaatgcaataggcttcctatcattttcacttctaggaacaccatgattaatcaacagatgccagagatctacatgagtcagactattgtgattgctgctttgcctctgctgtccattatggtagctatgcccaccttgcctttgacagttgactggcccctgccacctcgagatccaattattcccattgcatttaagttttgtagttgagtgactgtggttcctactgtaaaatctggcatacagagaagagcaatcacaaagctcttcaaggatgcaggtactcccctcacaaatctattttgcaaagtattagtcaaggatatattttctggatcctcccagctgggatgagtaggtctaaactgactaatccactccaccatcccaatctccctaaaccttttgatcccttcctctacattaaaccaagggagatcaggcatttccagcttgctcacagtgggccatcttttaatccatatttcagctaaccaagcacataaattatcagaacctttttaaactccccaagctgcaacattaaatgcagaatccctgcttagtgggcccaaatcaataaattcagcctgatccaatgccttggatctatgttccatccaccattatcccacacccttaatatccattcctatgcctgtcctccagatttttgcttatataaataagaaagctcaagcagttcttttcgagtgtagcacacctcctcatgggttatactctgaacctcacccctagggccctcctgggactttagtctagttataggtctagaagcaaacaggggtggtggggggtgggtcctgaggagaatcaacattatcttgcctggcaactgcctcaggggaagccatcactgttgcctcaggcagtgcagggtttttctcctcagacaaatgtggaaaggctgatggcagtgtgggttggggaggacatgttgccactactggggatgagaaagctgtttcttctggcaaaaaaagtttcatcagaatttataatctcagtgtccccagcttcatcagggtccttttacatatccccattccaagtttcaggatcccattcttttccaatcaatgccctcatttcaacagtagacacctggcaaggctgtgcatgcacctttcattgcaggtcagccactggtatgataagaacttgtgtccaatttcccgcaatttcagctctttctctacaggagataagactctcactcagggcaatcttagcaggtttgaggttcagtatctgcttctgaagctaggaattagaatccctaagttcatcattttctttcatcactttgtccagtgaacttaggaggaaccaaccaacttcattatgttccttagttccccacatatggtcaaaggtattacatatagagttactaaactccttgcctctcacgaaccgtgcatcaggagtgtcaaatgaatttattttgtgtaactctgtaaacagttcgtgccaaggactatcagtgttctccatactattagaagtacagtccttagcatttttgggtctaatcatattaagcagccttctccagaaaccccaaaaccaatgaaagaactccatccttaatagtctgttcttctggaaccactcctgggaccaaaatctgtattagtcagagctctctagaggacagaactaataggatagatgtatatataaaggggaggttactaaggagtattaactcacatgatcacaaggtcccacaataggccatctgcaagctgaggagcaagcaagccaatccaagtcccaaagctgaagaacttggagtccaatgttcaagggcaggaagcattcagcacaggagaaagatgtaggctgggaggctaagtcagtctaatctctccatgttcttctgcctgtttttattctggctgtgctggcagctgattagattgtgcccacccagattgagggtagatctgcctttcccagtccactgactcaaatgttaatctcctttgatgacaccctcacagatatacccaggaacaatactttgcctcctgtaatccagtcaagttgaccctcagtattaaccagtacactaagtatttttttttttttttgcagctgttgtaaaagggattgagttcttaatttgattctcagcttggttattattggtgtatagcagtgttgctgatttgtgtgcattgattttgtatcctggaactttactgaattcatttatcagatctaggagctttttggatgaatctttagggttttcagagtacatgatcatattgtcagcaaacagcaacagttttaacttcctcttttccaatttggatgccctttatttcttcctcttgtctgattactctggatgagactttcagtactatgttgaatagaagtggtgaaaatgggcatccttgacttattccaggtctcagggggaatgctttcaacttttctccattcaatatgatgttggctgtgggtctgtcatagatggcttttattactttgaggtatgtcccttctatgccaattttcttgagggtttttatcataaagggattttgaattttattaaatgctttttcagcatcaattgaaatgatatatggtttttggtcttcattctgttgatatgatgtatcatattgattgatttgtgtatgttgaatcatccttgtatccctgggataaatcccacttggtcttttaactgtattgttgaattcagtttgctagtattttgttgaggatttttgcatcaatattcatcagatatattggcctggagttttattttattttgatgtgtcattgtttggtatcaggataatactggcctcatagaatcagtttggaagttaacccctcctctactttttggaatagtttgagtaggattggtattagttcttctttaaatgtttggtagaatttggcagtgaagccaatgggtcccaggctttactttgctgggagactttttgttacaactttgatctaattacttgttattggtctgtttaggttttaatttcttcatagatcaaccttggtaagttgtatgtgtctaggaatttatccatttcctctagatttttaaatttattggcatatagtggctcatcatagccactaatgatcctttgaattcctgcagtatcagttgtaatgcctcctttttcagctccgattttatttacttgggtcttctctctttttttcttcattagtctgtttaaaactttgtcaattttatttatcttttcaaaagattgactttttgttttgttgatctcttgtattttcatcatttcaaatatatttctgctttgatctttattattttctctactaattttggattcagtttgctgctgcttttctagttctttaagatgtatagttaggttatttaaaatgaggttttcattcttttccaatgtaggcaattacagctacaaatttccctctaatagtactccttttgttgtatctcataggttttggcatgttgtgtttccattatcatttgtttgaatcaaattttcaatttccttttaaatttctttattgacccactggtcattcaggagcatattgtttaatttccatgtgttcatgtagtttccaaaattccccttttttatttctaattttacttcattgtggtcagagaagaatcttgatatgatatcatttttaaaaaaatattttaggacttgtattgtgactagcatatggtctatctttgagaatgatccacgtgctgagaagaatgtgtattctgcagctgttggatgaaatgctccataactatctattaggtcaatttgttctatagtgcagattaagtctgatgtttctttgttgagtttttgtctgtcagttctgtccaatacggaaagtggggtgttgaattctccacctattattgtattgtgatctctatctctcttttagctctaatactatttgctttttatatctgggtgcttcaatggtgggtgcatatatatttataattgttatatcctcttgctgaattgaccccattatcattgtacaaagaccttctttgtctctttttggagtttttgtcttgagatctattttatctgttataagtgtagttacccctgctcctgttttgtttccattagcaaggaatatcttttcccatgtctttattttccagtctatgtgtatcttcataggtgaagtgtttcttgtgggcaacagatcattgggtcatgttttttcatccattcagccactttatttctttttattggagagtttagtccatttacattcaataatttcatttaagtaggaacttcctcctgccattttgtaatttgttttctcgtggtttcatggtcatctctcccttctttccatcttctttttcatgaaaataattttctctggtggtatgatttaatttcttgttttttattttttgtgtatccattgtatgtttttccatttgaggttacatgaggtttatgacttatcttatgacccattattttaaactgatggcaacttaacagactgcataaacaaaaaacaaacacacaaaaggaagactaataaaagttctacactttaactgtatcctcctgcttttaactttgtgttgtttctctgtgtcttattgtactatgttgtgaaaagttgtcttttttttttttttttttctgagtcagagtcttgctctgctaccaggctggagtgcagtggcctgatcttggctcactgcaacttctgcctcctgggttcaagcgattctcctgccttagcctactgagtagctgggactatgggcacgcaccaccacaacacccacctaatttttatatttttagtagagacggggtttcaccatgttggccaggatagtctcgatctcttgacctagtgatccgcccatcttggcctcccaaagtgctgggattacaggcatgagccaccatgcctggccaggttgttattatttttgaccagttcatcatttactctttctacttaagataagtttacataccacaattacagtgttataatattctgtgtttttctgtatgcctattcttaccagtaagtgtctcggcattgaagagctaggtatttcttatagtctttgcagtctgggcttgtttatccctgtccttcttgagaaggttttccagaaggtttttatttgaaggagcttgggcctcaatcccaataatactgtggtttttgcagactagtagaggtaccatcttggaggtcttgaataagatccagaatgattatctggattgccaggcaaaagcacttgttcttttcccttactttctgtcaaacagtctctttctgtctctctctctctctctctctctctctctcaaggtgctgggccatcttgaactaggggtatggtgatgcaagcactcctgtggcccccactttggattgtgctgggtcagacctatagccagcacagccctgggtcttgtccaaggcctgctgtaaccactacctgactaccacctatgttcactcaaggccctagggctctaagatcagcagggggtgacaccagccaagtttgcatccttccctttagggtagcaagttccccctggccctgggcaggcccagagatgctacttgggagtcagggattggagtcaaaatacttagaaatttgcctgatattttatttgactacggctaagctggcactcaaaccacaagacaaagtctttcccattcttccctcccctttccacaggcagaggtgcctctccctgtggccagtactaccactggtccacagggaatctgcctggccactgctgatgttcacttaaagcttaagggctgttcagttgtgttgtggtgaatgctgccaggcctgggactcttcaaggaagtgggcacccctctgccctggggaagatccaaatatgctttccaggagccaaagcctggacttggggaccccaagagcatgcttgttgctctactccacgtggccaaactggtaccaaaggtgcaagacaaagtcccctttactttttcctctgtttctgtcaaacagaaggagtctttcactgtagccaccacaactaggaatgtgctggatcacacctgaagtcagcacatctcagaacctaaggcccacagtatactacctggatatcactgctggttatttggtgcccaagggctctttagtcagcaggtgattaatcttgccaagactgggtccttcccaccaaggcaatgggttttctatttgtccagggtgtgtctagaaatgtcatccatgagctagggcctggaatgcgggcctcatgactctactcaatgccctatcctactgtggctgagctggtatccaagatgcaagacaaagtcctctttactcttttctctcctctccttaagcagaaggaaggagtgacttttgttgctgcaagcttcactgcctgggattaggggaggggtggcacaagcactcccttagctgccccagctgatgacttcctaggtcatgtgccacccctatccctctggttctgagcccagcccagcactaggagttacctaggaattgcaatccttgtgtcctagactgtctttcaagtttacctagaacctcagagcacttaagcatatagtggtgaggcttgctgagttctgactgctgggatgagtgattcgcctctggccaggcctgttccaaaatctcccttcatgtgcagctgctggctgagtccagcacagtgttgttccctgctacgacagcaccgagtttaatgtaaagttccccagttgctgtgctttacttcctccaagtgcgcagactccccacgttgctcagctgctgctgggggatatgggaggggtgatggtggtgatcccagagtgtctctccaaccctcttcaatgcctcttttagtgatacgttgttaaatctaggtactacgattgctcacctgatgtttggtttttgtaatgacgcttttccgtgtgcagatagttgttacaatttggtgttcatgtggcgggggaggggggggatggtgtaggcttctgttccactatcttgctccacctcaatagtctgatgtgcagaagctctttagtttaattaggccccatttgccaatttttgtttttgctgcaagagcgtttggcatctttgtcatgaaatctttgccagggcctatgcccagaatgatattttctaggttttattctacggtttgtatagttttaggttttacatttaactctttaatccatctcaggctgatttttgttcatgctgaaaggaaggggtccagttttcagtcttctgcatatggttagctagttatcccagcaatattgagtaggaagtcctttctccattgcttgtttttgttgaagatcagataattgtaggtgtgcagctttatttctgggttctctaacctgtcccattggtctatgtgtctgtttttgtattagtaccatgttgttttggttactgtagccttgcagtatagttgaagttgggtagtgtgatgtccttcttgttctttttgcttaggattgctttgactatttgggctcttttttttttccatatgaatgttaggatagtttgtttttctaattctatgaaaaataatattggtagtttgataggaacatcattgaatctgtgaattgctttggacagtatggttatcttaacaatgttgtttcttcctacccatgagcgtggaaggtctttccatttgttttatcatctctgatttctttcagtagtgttttataattctttttatagagatctttcacatccttgattagccatattcctaggtattttctttttgtgtatgtctattgtaaatggcattgtgttcttgatttggccctcagcttggatgttgttggtgtacagaaatgctgatttttgtacattgattttgtatgctgaaactttgctggaggttttatcagatgtaggagctttttggcagagaatatagggttttctaggtataaaattatattgtctgctaagagagataggttgacttcctctctgcctatttggatgccttttatttctttctcttgcctgatttctctggccaggacttccagtaggatgttgaataggagtggtgacagtgggcatccttgtcttattccaagtctcaaggggaatgctttggatggtaccaatccttttaaacttattgaggattgttttagataatgttccatgtgcaattgagaagaatgtatattatgctgctattggctatatgttctatagatgttgctatgatatgaatgtttgtgttccccaaattcataaattgaaacctaattctcatgttgatggtatgaagaggtgagacctttcaaacataattaagtcatgagggcagagccctcatgaatgggattggtgcccttataaaagaggcccagagaggtgccttgcctctttcaccatgtgaggacacagcaaaaatgtgacatccatgaaccaaaaagtggccccctccccagacactaaatctgctggtgcctgaatcatgaactttcaagcctctagaacagtgaaaaataaatctctcttgtttattaactacacagcatatggcattttgttataatatcctgaacagactaagacagatatcgtttaggttagttggtttttagtgttgttcacatctttcatttcctagtgatcttctgcctagttgttgtccattattggaagtggagtattaaagtctccagttatgactattgaattgtctatttctcccttcatttctgccagtttttgcttcatgtgttttggggctctattattagatgcaagtatgtttttagttgctatatcttcctgattggtccttttgtcattataaaatgtccttcttgatttctagtaacactttttgtcttgtctgttttgtctgatattagtgtagtcactccagctatcttgtggttgctgtttgtacaatatatgttttcccattcttttactttcaatctgtttgtatctttgaatctaaaagtgtctcctgcagacaacacatagttggatgttgttttcctaaaaactctagactgacaattctgccttttgattgggttctttaatgtattcacatgatgttactattgatatatttggatttatgtttgttattttactcctttttctatatgttttaattctctttttttcctatacttttcatttactgatttatattaagtgaatattttagaatgtaacatggtaatttttaaaataaattttaaactgtatcttttgagttattttcacagtagtttctctagagtttaccatatatattttagcttattggtatctgcttcagatttatattaacttaattctagtgagatataaatatgttacttctagatagctttatttctcttctgccttttgtattactgttacacatattacatcttgtggtggattgaattgtgggcctcaaaaatatatgtccacatagtaacctttggaacctgtgacctcatttggaaataagtctttgaagacataattatattagagatttggggatgaaattaccctaaattttcaggtgggggctaattccagtgaaaagtttgttttgttttttaaataagagatagaagatggaaaacagacacagaggaaaaggccatgcgaagatggagacagagattggagtgatgtcaacagccaccaacacctggaaaaggcagaaacagattctccgtagagcctctaaagggagtgcaaccttgccaacatcttgagttttaattctcctctccaaacctgggagaaaaactgtcttaagcaacccagtgtgtagtaatttgtcacagcagccacagaaaaccaatgcacatttatagtattatatacccaacaatacatcgctataataattattactttatgtaatcttatattttttagaggcactaagagaaaaaaggagaaaattatatatttatggcatttcttatttgtcattgctagttctattcatttattcttgtggattcatattaccatctggtgtctttttttaatcagatacagctgttctcccacacacctcttttatactgtaattgacaaatttgttatatttctgtatgtttttggtccaacaatagagttctacatactgttttatgcaattcgttagactcaggttttctatttcaccttcgaagtgtggcccttaggccaggagcagtggctcacgcctgtaatcccagcactttgggaggccgaggcggatggatcacaaggtcaagagattgagaccatccttgccaacatggtgaaaccccatctctactaaaaatacaaacattagcttggcatggtggtgtgcgcctgcagtcccagctactcaggaggctgaggcaggagaattgcttacacctgggaggtggaggttgcagggaaccaagatcacgccactgcactccagcctggcgacggagcaagaccaaatctaaaaaaaaaaaaaaaaacaaacaaactgtggcccttagaacttaaagtcatattttggttctcaaatcagttccaagagtaggtgatctagccctttcattctaaacactacacatgtagtactagagtataatattgtatttgcttattttttcagagtcagggtcttgctatgttttctagactggggtgcagtggggcaatcatagctcactctaaccttgaactcttgggctcaagagaatcctcctgcctcagtctcctaagtagctaggactacaggtgcacaccactacacccagctaatgcattttttttttaacacacataaagcacagttttttcacaatagattgacaacgataattcacgtcttttttgctagatgatattaagccacagatcaaaaagtcctagacttttatacttacttgaaaaaaacctcaaatttgctgaatgccattgtattaagagctaatctgtctggtccaatcacataatatatttgcctatattcaagtttcatatttctacatatttgataaacattcacactagattttcctctgtgctgcagacaaaaattttcttcaatggtgtctgaaaagggaggcctgcaaccactaccaaaccactctacctgagattagtttattagatagtgcctaacctgaaataaaaatctgctgatagaacattctgcaaaaaaagctctattatgttatagtagagctcatactatattatggtttcaaaggtaataagaaaaatatcatcagatcatcattatggtagctattttaagggaacttaataaaaatttaacagttatcatcaaacactggccacctcaattttaaacagtaaacacacgaattactcccataaaaattataagcataacaggacacttcttggctactattcaatactgacttggatgttctagataacacaagataagatacatgtgtgaatatctatacacatatagacatatttatagatgtgtgtgtatatatacagtatatatataagattttagaaaggaggataaatatatattacatgataaaacttatagtcaatataattttacacttgtaaaatcccagaaaaccaaaggaaaaaatagaactaaaaaagagttcaatgaaatgattagtttaaaaaaataaatataaaaaatgtaattttcccacataccttcaaaatgtagcaatcccactaagcaaaaagtggtatttctaccaactatagataaatgaaaattcacctttaaatgtctcttatcctccatgaaactcatcaaaaacaacaaaaagtacagcagacaaaaaaaaagtcttatctttaatgaaactttgtaaaacatttgaacctcaaccatgatgtgtatgaagataagttactaagtgccatgaagattggaccaagatatgaaaatgctaggagaggatacctttcactgaagatcttggaaagggttggtatattggtattttctagagtagtgattctcactgagatgcaaaaccaaagactccttgttttggattaaaaagatctaggtacagaggctgagggcagaactctctcattatcctatttgtcaacacaaaataggagagaaggcaggactaaatctgagagtgagcagatgcaccattatttcaagattgaacctaaggatgtggcaaggtaaggagaaaagtcaggatgacaagttgccctgtagccgccagttctcatcagttgaagatatattaaaactatggtacacataagccactccatcaaacagtaaatatggctatactgcaagcagtaaaaaagtgaacaggctctgcttccatacagtcaagaacaaaaagaaacacttgacaaggttgagaaaaataaatggaaaaaaataaagaatttaaaagaactggagagaaaactgtagctttggaatacagaaaaaggagatacagcatactgctaatagatgtcctcaaagagaccaaatacatagacaaggggaaaaaatccaaagacatcattcaagaaaaaattttgagatacaaataaacttcagacttttacttccagcaatggaaatccagtttgtcttcagccagtggcatatctcagacaataggcaagccatgagaatggttgttggactgcagtttcggactctattactacatgtatagtatttagaataaaagagctaggtctcctcatgtcagcacttatttgaccaatgggagtatgattttaagtttttagggtcacactttgaaggtggaatataaaaaaaattatagaaagataaatttttgttcagatgcatctactgcagcaatttgggaggctaaggtgaaaggatcgtttgagcccagaagtttgagaccagctgggcaacatagtgagaccttgtctctacaaaaaattaaaaattagctgggcgtgggggcgcttggcctagaagttcaaggacagtttgggcaacatagtgggaccctatctttataaaatatttttaaaaattagttgggcatggtggtgtgtgcctataatcctggctacttgggaggctggggtgggaggatcacctgagcccagagaggtaggggctgcagtgagccatcttcacaccactgcactccagcctggatgatgaagtgagattctgtcccaaaaaaaggacaaaatgaaatatcagcaatgaaaggtcctgctaaagagaaggtttgttaattcataattttaatgtttatctggtcatcttatccaaaaggcaaaaatctttagcctcccttatctttgggatatcgttctctcttaaatgttgctttctcacaaatcccaatttacttgaataagaatgcaatgttatgccaaaagttagggaggcatatggtgggacaaatcctactgggtggatggtttcttcattcttttcacaaatgaaatcttctgaaaatagacgtcagtggcagtttaaatagagaaatgggaaaaagggaagccaaaaatctgagaagcgtgtgaaagaggaggagtttctgtgaagatttcccatactgttctctgtatgcatttttccttttttcctcacgccctaatctatacccacacatactatccctctaggtgcagctcagaattcctaaacctggtataattggaggcatggctgcagacctaaaagttcggtacatctttacagttgtatttcatctgtttaaggcagaaagaataaattttcattccaaagcagttagcttgcttagcagcattaatttaaaatgaagaaatgcacatcctaatctctggcactgaagcagaaaattagttttggtttagaaatttggtgaagaataagttcaatttttatgggctgttttgcatcctggtgagatctaatgaggtctgtacttgtgactacctaataggctgacatgtttcctcctttaattttatctgagacttggtgtcaatgattttttggtttcttaattcaaaaaggcaaactagccaaggggtatttactacttatattgccttatatcacagtgtgccctttctagttccctagaagagataacgaatgggtttgtgtgtttagggaggtaactggtttttagtggaacactggcattatcaatcccactcttagtgttaaaaagagaatgcccgagctacccctctccccaccattttaatcagcaatttttaaatgttttcaaatattatagaaatatgcaggctgatgccaggtgcggtggcatggggctcacacctgtaatcccagcactttgggaggccgaggcaggccaatcacttgaggtcaggagttcgagaccagcttgtgcaacatggcgaaacctcacctctaataaaaatacaaaaattaaccgagcatggtggtgcgcgcttgtagtcctagctacttaggaggctgaggcaagagaatcgcttgaacctgggagggggaggttgcagggagctcagatcgtgccactgcactccagcctgggtgacagagcaagaacctgtctcaaaaaaaaaaataaaataaaataaaataaaataaaataaaataaaaagttaaaaaaaaaatgcaaggtgagtgcagtggctcatgtctgtaatcctagcactttaggaggctgagataagatgggaggatcgcttgagcccagaagtttgagaccagactgggcaacaaagcaacacgctcatctggaaaggaaggaaggaaggaaggaaggagggaaggaaggaaggaaaaaaaatttcaaacatacacaaaagttgagagaattgtgtaattgaccccaatgtaccatcacccagcttcaataattatcgatacttttaggcaggtttctaccagaaaatatgtcctggaaactttaattcttgatctgtgttcagattttgcctttcaaatgtttcattattggggctttggacatattgcacctgtattaaaagaaggatttgagtgaggaatttagtgcttcatagtcaatagtcaatgagtctccttttggctcgcctccttcttagggaaaggaactggttgtagggtgttaggcagaatttgggtgtatctgttgtggctcagagatgtttctcatagaactgatcactgtcccaatatccacgcaaaagaccaaattaaaagcgaggagaaatacctaatgtaaatgacaagttaatgggtgcagcacaccaacatggcgcatgtatacatatgtaacaaacctgcacgttgtgcacatgtaccctagaacttaaagtataataataataataataataataataataataataaagcgagggtgggtatctagcctattcttatcctgcctcatggtgttttctaaatatttacagaaagaaaatttacagagtagtttcctggtcaaactctaatgagtatctcagtactttcccctccacttctcacgtcttctttggggacgggtcgtcaagtctttgagtttctagttattgctattgactggtttataacctcctctttcacccagatcgtcaagggccgtttgcaaagcactcccaagtagagcctcttggagaaggagaaactgctatcacgcaaaaaaaaagccttgagctcgctggctccgctgcctcgaaaagccagagtccggaggcagtttgatgcggacactattccccaaccttcttcccctccttgtcgtctctattgccctcttggcagctcctgggatacaagagggtgcaggacagacttcaacccgcagcaggatccagcgcggaaagctctgcagcaggatccagcgcggaaagccccccgcagcacttctttcggggggctcctgtttccttaagcctagaaggtgtggtcgctcacgttcaccgtcccgcctctcgccgcctccgctcggcagctccacgctgagtcccgccctctccgccggagaggtgcgccggggtcagagcgccgggacccgacgcgcggctcccaaagggcggcaggaagagcccagctgggctcagccacagttatcagcaatctgcgggcagaggatgtggaggttaagatctgggcagcctcagggcgttgtcctagaaaacaccgtttaaggagagaagtgttagtgtctcggggcgtctcccaggctccgccctgcgcccgcagccagcgtggtggtcgagaccccagcccgctgctactggagacagcacctctcgcgcccgggcgggcggcctcgtctctgcacccctaggcggcgctgcgctcctcaacacccggccggctccgctttcccagacggctgcccagcctccagcctagcaagcccggctcccagctggccagccccggcaatgccggcgttcgggaggcgcaacgtcggcggtcgctgagtatccagcccgcagcagtgacggccggcaggagcgtgctcttccccgcggctcgtgctctccaggagtccggagcatggtcctgggtcaccgttggtgtagcgtgttggtggaacgtggacgcctagagggaggatggtgggctgtggggtggcagttttatgtttgtgggtttcctgcggcgctgcagcgggacagctcgagtactcagtgccggaggagacggagcggggcgtagccgtaggcaatctctccgcggacttgaggctgccagcggccgctatgtcctcgcggaactttcgcttcctttccagccaccgcgagctctacttcggggtggatctacccagcggcaatttggtggtcagagagccggcggaccgcgaacagctgtgcagggccaaagctgcctgcgtcttgacctacgacctggtgctcgaggacccgctggagctgcacaagattcggattcacgtcctggacaccaatgacaactcacctctctttcctgccggcgacgtgcagctgcacatccccgagttcctgacgcccggagcccgctttactctcccgaatgcccaagatgacgacgagggaagcaatgggatactaagctacagcctaagccccagtcagcactttcgcctggacatgggatcgcgggttgacggcagcgaatacccggagttggtgttggagaaagcactggatcgcgaacagcgcgccacccacctgctggtgcttacagctcgggacggcgggctacctgcccgctcaggagacgcacaagtcaccatcattgtggtggacacaaatgacaacgcgcctgtatttgagcgctccgtataccgcaccaaggttccagagactgcacccaatgggactgtgttattccgagttcaagccttggatccagatgaagggtccaatggggaagtccagtactccctaagcaacagcacgcaagcagagctgcgacaccgctttcacgtgcaccctaaaagtggggaggtgcaagtagctgcttcactaggtccgcctgaaacgctcttggaggcatacattgaggcgagggacgaaggtgtctttggtttagctagcaccgctaaactgctggtggaggtgactgacgtgaacgatcatgcccccgaactggacttcctgactctttcgaacccagtacctgaggacgctgcccctggcacagtgattgctctctttagtgtaaaggatgaagacctcgattctaatggtagggtcatttgtggcatgtctagtgcaggcccttttcagctgacggcttcctttgacaactactacagcctgctgattgatgggcccctggaccgggagcagatcagtgaataccaagtcctgatcacggcctcagatagtggctcacccccacttagcacccgaaggacaatcactgtgtcagttgctgatgtgaatgacaatacaccaaactttcctcaaccccagcaggaacttttcgttgctgaaaacaatggccctggggcctctctaggccgagtgtttgcccaggaccccgacctggggaagaatggccttgtctcttatgagctgttggatgttatctctgaagggccatcagcctctagcttgctggcagtggaatcatccagtggggccatcactgccaaaacttcctttgactttgagcagctcagggggtttcatttccaagtagaaggccgggatggtggcattcctcccagaagtgcaacagtgactataaacttgtttgtggtagataggaatgacaattatccggttatcttgtttcccttgcccagaaatggttctgtcccagtggaaattgtgccccgctctgccaggactggacacttggtcacaaaagtggtagcagaggatgctgacagtggttctaatgcctggctttcctaccacatctcccgggcgtctgactctagtctctttagaatttcagccaatataggtgagctccgtactgctcgcttagttcttcccactgatgcagttaagcagagggtggtggtagtggttcgggaccatggagacccaccactttcctcctctgtcactctgggtgtgctgttgagcaactctgtccctcagttacttccagactttgaagatgtctgggaaccaggagggcagctttctgcccagaacttgtatttagtaattgccttggcttgtatttcctttttatttctggggtgcttacttttcttcgtgtgtaccaagttgcaccagagcccaggctgttgcgctcagagctgctgtcgctctacagaggatctgaggtatggaagtaagatggtttcaaatccttgcatgacatcagccaccatagatgtcactacagttgagagactttctcagacttatctctatcgggcctctctgggacttggttctgataataacagtttgctgttgcgtggggagtacaatgctgccgacctgcgaaatcttgccactggggtaggactgaatttgccaatatcctgtattcagattcggaataggaaaggggatcacgctaatgtcaatgccatggtaagcaaattttatggaatttgattcctttggcccggagatggctgctagctgtgttttgaaatatttcttagacaagcctttcacaacatttcatcaattgaactaaacactccttcttagcacttcctgtgccaagaaatctggaagtatagaagtattagaagattgccctaggcctcaagggacttatagtttatttttgagaaacaagggcaaaaattaaaacctatttaagaacaataaaagtaatatgacataaaggtctaaaattaaaaataaaataccaaaatattttataagcaacagatgtgtaaggcactctaatatttaaagtgaagaatgaaaaatatgtaagagtctgctttatatgaatataatatggaaggtgaaacatttacttaaactattgcaatgcattattaaaagatgacgataaccacaaaagatgtaaaaataaattacaatgggggttaaaagaagggagaaagggaacataagagaacatttgagtgaggaggaaggagtcagagaaggctttgtgatagagatcacagatttagttggatctttaatacgatataccatttaataaaaaacagtgtattctctagcctatacttttaatgaataccattttggtgaaggtgtcttctttgggaatgacaccctaaaacatagctgatagctccatagcagtgttttgtaactgctttggagtttttgcttacacaaaaactgtaagcctctctcataacatctatttatactgataggagatcatattgttggatataggacttgacaaccttttgttttgtgtttctattgataatattttacaaagaggaaagatgagtaatttttatgtcagaaatatttatgtgttcaaaggtgcacttaccatccaaagtccattcaacttggatttaatttcttttattttaggggacaaatacacttaacaaataagtaaatatcatatttgagagtaatgtatctaatgaaagttaagtgattcaaatatttcaatttatctgttagtggcccttggcatttcaaaacttcttttttttttttgagacaggggtctcactatgttgcccaggctggtctcaaactcctagcctcaagtgatcctcccacctaggcctcccaaagtgctgggattacaggcatgagccactgcagctggccctcaaacttcttgagtgcagttaggacaacattttgaagcaattctacggtattactttttgacttctcatagaaatcctagatgcaagagaaggaggtgtgtagaaattaaggaaggaaaatgaagcattccttgttttactattctaggcaataaggggaaaagtggcttgtaagttattcttcctcaagtaatgatgttaactgcaaataaaataaatttacatatgttaaaattttctgtacttaatattttcacaatataatagaatccagcatataagatatgcttagtaaatgctgactgaatgaataaatatgtgcatatatgaattggatggtaacactgttcaacacagagggaaaaactttaacttacttttctactttagatgtgtatatgtggttaacagtttaaaggtcactttcaaatgtactgtttcaatgattattttcttcctcatgacctacactaataacataacagaggaattttctgattgtagagctagcaagaaaaacttcaatgctgtgtctgggactaagtatgagtccagttctacagatgacaaaggaattaataggtatgcacatcattacattgtgatatttgcagtggatactatttaatagaatctcagttaattttagggaaggaaattggtgcactacaatgctagtatttcaggtatcagagcacttaatatgtgaacacttttcctaccaagaaatttcactatttatttcttttattttcattgctttctgtaacaaaaagagaggagaataccagtaatggctgtaaagtttgggagtgaggaattttttttagaaacacattttcactagactagaaaggaaacataagtaagcgataggaaggctgatgaatctagaagttagaaggaaaattagctatttaaaaggaaaaatataggaatgacagaggaaaaaacaacccttcaaaccaaatttttaaacatatatgaatgattaacaaaataatagagatatactgttcatatgtgcaggaatattgtaccatcccattcattcagttgaacagtctttttccatcattgttgatattttgctttttaggtagctcattggtctgctaataattgttgtgggctggatatttccttataaataaatgaattgtgattcataaaaccatgaataaaataacttctataaatatggggtatttgtaattcacaaaggcatttgttatttacttcttcctgttcaattacctattgatctgatcttaattctttagaaaagaattcttgtcatagtatcctgaatgccttaataacaacaggattctagaaataaaatatttattgctttcattttatttcaaatcatttgaaaagcatgacatttaacaatgattataatgtgtgtctgagtcttacagaatcatgttgatgcatatgtgtttatattttgctcaaattctaagttctttcattttagtttacggtaagtttacagtatatattaacatagcctgtaatactaaaaattatcagtttaagaaattcaggaaaacatggtttttatctctgtatttccaattgataatatttaagatataaacaaaattgattcactgattgtataacaattagacaatgtgtacctcatgtccatttttttctgttaatattcttgatgggcaatttaaattttttagaatggtatctaagagggtacctctgagatataaatttctacttattaaaaactgcattgacaatttttaaaggtataaatatattaatgtagcaaaaatgcatgaaacacttaccatacaactggccttattaaatttccacatgaaagttatacatagtttcaacataccaatgttatattagtgtattgttcacctggaattaaagcatcttcttttttgccagggtatataggaaataggatatctcctctttgcaatgtcatttgttaacagtagtagaatgtttgtggcattcaaggtgctttatttaacatacattccacaagtagactttcccatagggtaattagatgttttgtatatctattttgactttgaagctgataaccacactaaaaaactttagaatgatgaaactaaggaagtttgcatgacatatgaaatatattcaaattaaaaaactcatatagacaacacaataatattgtataatatagaccctcaaatcagtaaaaaggaaagaaaaagaacattataatttgagtggacataagagaaaagcaataccttggaaacatataagtgggaaagtattgacaatgtgtctcataatgttaatgacttattgtcttttgttgtcttcaatattttcagttagagggaaacaataatatttcaacaactaaattaacttagctaggttggaatgaaggtggactaaattgctgaaaggtttttacaatgctcaaatgcatgtcatatgaatatcggaaatattaacacttggcagaacttcaagtgaatatggattacagtccaggatcctgactaaagtattatgggaagtaaggaatttgttggtaaaggttgttcttaagaaacaaagctaaataataaaggtagatagccactcattttgttcccaattttaattgatggcataagataatggttcaggatataaataaattacatgtctgttatattgcatttatgaaaaagaaaggactataaacacaaaaggttattatatattcatttggaacttgttttggaatctggaaataaatatgcaatctcgtattctcctgtgctgtagagaaagataaacactttatttctaacccatcccaaattccttggctgttcctagagccatctggttaccatctacagatattctgtgttcataggggcactctaatgacataccttcaaaatatactctgaattcaaacacattatggttattctttagaattgttaagcaaagactacagctgttttgtttaaactcaaaataatgttaatataaaataaaaaccaattaagaagtcttaatagtgggtttttaggttgatttgtctttttcttttcttattaggttaggctggccctgttaaacaagttggaaatcctgtctctctctctgtctctctcacattttttttcctattcctcggacacatttactgagattggtgatacagctttcttaaatatttggtagaattcactagtgaagctctctgtacctacagttttctttgtaggaaaattttaattgagatcaaatttctttgtatttttattgctcctatttcattcctgtacctttaattttttcagatatatgttagttttatctgtacttttgaatattttggcataaagttgtttataatgtcctgttgtgactttttttcacatctgcaggatctgtagtgatgtttcccttttcaatcctggtgttagtgtcacctctcatttttcttgactagacttggaagtagtttattaatgatattagtctttccaaggctaacttttggtgttttgggttcgctttgttgtatgtttgctttctattttattaattttcatactttattaatttatttccttccttatatgtttatatttcagtgtgcaacagaagtactctaaacatacttttcatttctatttcctcacacaaaatgtttaaaagatttgtacttaattgtggagatttatcaaaattaataataatcagtgcttcatcaagggcattcttactggtatttttcttactgcaaatgtccaatcatgaatgtaataaccaccagtacagtgtggagccactgctttgactccttctgtggttctatggtggccagctttacccaccaatgcttttgcattatcaatgcaagtgtaaatatagtgaaaaatgcaaataatgttttaacattattttgaaaattatattcacctcataaacacccaaagggtccatagaccacacttcgagagctaccgttctaattctatcatttcttcttttttttaattaattgtaacatttctgtaatgggtcttcaactatttgattagcctgaggtacagttcacacaggaaaggcaggataaatgtttgattcttcccctttgtttagcagtattcaaaacaatgaattgattcctggccatcttacaaaaaggaccaaggccttttttaggtgtcattatgaactcattgacttaaacatatttgatatggcccaatccatgtcaattatctttttaatgatcaaattatgctaactttggcaagttgggaactgttcagctttgctcctgagtctttgtgagtgtgtttgtgtatcttgttttaaaccttttattttggaataattatggattcacataaagttacaaaactagtatagagagatcccatgtgcttgtcacccacttttccccagtgataacaccctgaatccttttcatgtgagtcttaatagtcttttgaatgcttccttgatttctggtattacaagatgttcagattatcttgtacatttcctttcccagaatcagccatttttcaaagagctttcacttatttttagtgaaagatgatacttagagatataatctcaacaacaggtgtgcttattgctgctgggtcagttgctgtttctaggtatcttcagctactgagctaagggatgtctattttttaaaagataaaatacatcacatgtttatactaatctaataaagttcagcactccgaggtttttacttaacttcatcaatcttacattcctatttctcccatacgtcaaatcccagttttcattaacgtcaacagaattactcatttgttatcccacgggactcaaacaatggacttagaaaacaatttcagcactacagaaataatatgatactgtagcagtttaagtttttgtcattcttttcatttataaggcacatccttacaaatgcccagtaggcatgtacagtcaaattattgtgttttaaagtatcttggaaaagttcctctctgtgtagttaagccaccagctagatacagagctaggcttttttcaagtcgctttcaaatttagggcttgctttttaaattttaattttcttttataattatgtgaaatatttacatggctccaaaataaacttataaaacaaaatatatttagagaagtctagtatctattattccatacaatacacattcttccccactttgagttttttcacttaaaaatataaacgagattatttcatagtagtatagtatttacacatattccatactgcttaatggtgtcttttgattagcaattaatgagctccaatttatcaatattatcttttttttttttttttgagacagattctcattctgttgcccaggctggagtaaagtggtacaatcttggctcactgcaatctctgcctcccgggttcaagcgattctcccacctcagcctcccgagtagcggggattacaggcacccaccaccacacccggctaatttttatacttttagtagagacagggtttcaccatgttggccaggctggtctcgaactcctgaccttaagtgatctgcccgccttggcctcctaaagtgctgggattagaggcctaaaccaccacgcccagccaaagttgtcttttttatttagtattctttctatccttttaaagaaaacatatcctgcttcaagtcatgaagatatattcctgtgttttcttctataacattgctatccaatagaactttctgacatgctataaattttctctatctgcatatatggaatgtgtagctactgagcacttgaaatgtggctagtgaaactgggctactcaatttttaatgttactaattttaattaatttaagcttaaataaccacatctgtttagtggttgctgtagttctggaagctttcttgttttaacttgcacatttagatcttaaattacctgaaattgcttttgaatatagtgcaatgtagaagtcaagatttatattttccacttgtaaatccagttagattgcctactttcctcgctgctactgtgcagtgctacctttgtcataagcaacgtgactttatatattctgtttctggactgtctattctgtttcattggtcaacttgtctattcttgtgccaatacattctgtgttaaatatagtaacttttcatttgtattgatatctaattgtgtaagttctctcactttgttattctgcttcaagattaacttagctatttttggccctttgcatttctatataaattgtagattcagcttctcagtttctattttaaaaaaccctgctttgattttaattggcactatattgaatctgtagaaaatatggggtatattgaaaatatcttattttgatctttattgaatctataaaaatatgaagcttgttaacattgacaatattgagacagacaaccgattaacaaggtatattcttccatttatcttttttttttttttttgagacggagtctcgctctgtcgcccaggctggagtgcagtggcgcagtctcggctcactgcaagctccgcctcccgggttcatgccattctcctgcctcagcctcccgagtagctgggactacaggcgcccgccaccatgcccggctaattttttgtattttttgtagagacggggtttcaccgtgttagccaggatggtctcgatctcctgacctcgtgattcacccgcttcggcctcccaaagtgctgggattacaggcgtgagccaccgcgcccggcttcttccatttattttattattttatcttaatgtttatgtgtgtgtatgtgtatataggggtattgcacaacttttattagatagctgatattttaatgctattttaaaagtttaattttataatacaaaaattagctggacatgttggcacatacccgtaatcccagctactcaggaggctgaggcaggagaattgcttgaacctgcgaggcagaggttgcagtgagctgggatcgcgtcactgcactctagcctgggcaacagagtgatactccatctaaaaagaaaaagaaaggcagggcatggtggctcacgcctgtaatcccagcactttgggaggctgaggcaggcggatcacgaggtcaggagatcaagaccatcctggctaacacggtgaaaccccgtctctactaaaaatacaaaaaattagtcgggcgtggtggcgggcgtatgtagtcccagctactcgggaagctgaggcaggagaatggcatgaacctggaaggcggaacttggagtgagccgagatcgcgccactgcactccagcctgggcgacagagtgagactccgtctcaaaaaaaaaaaaaaaagtttaatttgataattggcttttgttgaaagtatatagaaataatactgattttatgttaactttgtatccaatgttcttgctaaatagtaaaatctcatatttttatattttgggttttctacatatactgtcatgctattcccaaataatgttagttttattattgtattttttactttctctctttttttaaaaaaatagagatagagtctcactacattgcccaggctagtctggagctcctgggctcaagcaatcctcccacgccagcctcccaaagtgctgggattacaggcataggccaccatgcctggtcttttaaaaactttctaatcacatagttttcttgctttctgtcattgcctatgaaattcagtataaaattgaatagaagtaatgttaatggataatcttgtcttattcctggtctcagagaggaagtttttaaatatttaatatgaaatacattgtttgattgggtttatttgcaaaaatcctttatcagatttattaagttccctttgttttttaatttattatgttttttaaaaatcatgaataggcattgaatttatcacatattttctgttattgaatggataatatggatttttatccttttattaatagcatgcattatattggttgatttgttaatgataaaccaatcttgcattcttggaataaactcaggttgcttatgatgtataatccttctttatatcattagacttagtttcctaacattttctttacagtttttaaatatatgtttatgatagaaacgcgtttctacagaaaaaaataattatttttaaaggcatagttattgggtactagacttagtacctgaatgatgaaataatcggtaccacaaacccctgtgacatgagtttgcgttataacaaacctgcccatgtacccctgaacttaaaagttaagaagcaacacacacacacacagatgcgcacacacacacacgcacaagaaattggcttttaactttccattcttataatgctctagtcggagtttggcatcaaggctatcctggctttatatagtaagttaagaagtgttacttttcttttacttattcggaagagttgtcttagtccatttgggctgctatatcaaaatagcataaactgggtggcttaaaaacaatagaaatttatttttcacaattctggaagctggaaagttgatgatcaaggtcctggcagatttgtgtctggtaatggcccactccctggttcataaaacagaatgtcaccttcttgctgtctcttcaccttctggaaggagcaaggtagctctctggaacctcttttatgagagctgtgccctcgtgatctaatcatctctacaaaagccctacctcctaatatcataatcttaggggttagcatttcaacttatgattgcaaaggaggagggaacacaaacattcagatcatagcaagtttgtgtaaatcagcatttttttcttccataagcatttgaagaattaagagtgaaatttataggcctagaattctcttcatgagaatgttaattataaattcaatgtctataacattaatagttatagaattatacagagcctctatttcttgttgtattagtttggttaatcaaaatggaaaattttaacataccttgctcaaaaacagaacaaggagacaaaagaaaatcaataagggtactgaaaacttcaataacaggaataaccaacttgtatgtatgtgtgtgttgctggacattatcatttgtgagatacatttatattgttgtgtgtagctgtgtatcattcattgtcattatatagtatttcagggtgtgaatggtcaatttctataaatgttctgcatgttcaagaaaaagcagtattctgacattgcttgttgttgtgttctgtatatgtccattaggtcatctttgctagttgtgttgttcaaatattctgcattcttttttattctttttgtttgcttattttatcagttactgagaaaattatgttaaagtgttccacgatgaatagtgaattgtttctccttggattttgtcaattttttgtgtcatatgttttaaggctattttattttattagattcttaaccaaatataaatatgtgatatctttctgctaaattgaaacttttagcgttatgtattatttacctctatttctgctagtgataaactattatagtttttgtttgcctgaaatgtcattcttgatagatatttttacatgggtgtaaaattcaagattggcatttatttcattttggtacattaaagttacctcctcaatatcttctgggttccactgttgtctcattgtgctgcttcatcagtaatttattatctttcttccaattttactaattttgtcttcttgtgtgtccaacatgctattaaaagtattccttgagttgttaattttggttattgtgtttttcattttaaaaattataattattactgatcaagtctgccatgatattttttataggtttctgttccctgcaattttttttttcaagacaagtcttgctccgtcgctcaggcgtgatcatagctcactgcaatcttgaattcctgggctcaagtgattctcctaccttggctcccaaagtgttgggatttcaggcatgagccgctgctcctggctcctgcaaatattcttaagcttgtcatttatttatttaaatatattaaatcttcatctgataattccagagtctgaagtctgcaagtgtatacctgctgtgtgctgtttcagctggacagctccatatttttatgtgtgccaacttttatttgacttttgatggtccatatcctgaaaatgatatttgccaggatatcctgagatcttggatggaaatacctttcttcacgatagatttttatacaccttccagtgagtgaatactactgctagtaaaccactttaaatcaagttcaagacttgaagctccttggctacttagactacgtattctcagataaaaatatgcaggatatctggtatctagttacaagtttataggattaaattttcctttcctattttccttctggcctttttggtgccaagtcaaattccccagcagttttctgggctggagagtaggtgggtttagttttcacatactattactggaaagattagtcctttgaagttccagcttaatgtagtttggaggccccataagactccccatcttgaacatcctgcttctttttttttctttcttcctttctttcttcctttctttctttctttctttctttctttctttctttctttctctttctttctttctttccttccttcctttctctttctttctttctttctttttcttctttctctttttttttttttttcagatggagtcttgctctgttgcctaggctggagtgtagtgacaggattttggctcactgcaacctccgcctcccgggttcaagcaattctctgcctcagcctcgggagtagctgggattacaggcgcccaccaccacgcctggctaattttttgtatttttagtagagacgaggtttcaccatcttgaccaggctggtcttgaactcctgacctcgtgatccattcgcctcagcctcccaaagtgctgggattacagccatgagccatggtgcccagcccatcctgcttcttaatttctgtcttcctacaacttatgtccaattttatgtcaagttcaatattctgtttacctctttgggcttagctttcctccacaatttgtcctagcagttccccattatcttatcagattttcagtgcttttaagataattgttttaatgttttacccaagaatatttagttgatttcagtaggatgactgctgtaaataatttaggctgccattacctgatattccctatcatagagttctatcaccagtgactagcatctaagtaacattgaaatgcttttatgtatatcttaaaatatttgaattacttttgttttgaaaacaatagtatctttactttccctaaaccttgataagggattcatatctcttattattaattttgggaaaaaataattcataaacctggtctattatgaaatgtttgctaattgagccaagagagcacatgcattcatctaaaacattcatataatcaaactttattaaaggtgatatttgtggctttacttgacataaaacagcttccatatttctctattccagacattttatttaaaatacatttttgagcataagatatttaaaatgtgtaggcaaataagatatccatatcattaaaagatatctaaagctggtaatggtggctcatgcctgtaatcctagctacttgggaggtcgaggcacaagaatcacttgaaccagagggaggcggaggttgcagttaacggagattgcaccactgcattccagcctgggcgacagatgagactctgtttaaaaaaaaaaaagatatctaacaataaacaagtaaactatcaattataatacaatcaaattcaagctacaactgaaataaatacatggtatctaggaaactcagaggggaagcaactaactcagtatggtggggggtagggggttgaggcagaaaaatcttcccatataggatgtcacatataattatagtgtttatatttgccaattgtaaaaaaaaaaatggcaaaagagatctcattcagaaaagcaataagcacaaaagttttaggaataactttaatgagaaatatgaagtaaaagtatgaaattttgttgaaaaatattttaaaatcttgtataaatgagatggcataatgtatttttaggcagaatattacaaaggcatgttttccacaaactagttggatttggccctgtgtcaataaaaattccagtaagatgattattttgctttagcatgacaacttttttcctaaaatttatctctaagaataagcgtgaagaaaaaaaaaattgaaaaagagtttaaagtgtagacgttctgttatcagaattaaattttggggctgggtgtggtggctcatgcctgtaatcccagcactttgggaggctgaggtgggtggatcatttgaggtcaggagttcaagaacagcctgaccaacatggtgaaatcctgcctctactaaaaaatacaaaaattagccaggtgtggtagtgggtgcctgtagtcccagctactctggaggctgaggcaggaaaatcgcttgaaccctggaggtggaggctgcagtaagccaagatcatgccactgcactccagcctgggtcacagagtgagactctgtctcaaaaaaaaaaaaaaaaaaaagaaagaaagaattaaattttgggaagtcattattagcaatattgtgtagtatccattggacaggatgagagtagaggaaaggagatcattaaaatatacaggtaagaaattatggatatttaaattcagactagaggcaagggctttaatatgatataaaggatagaattgataaggctaaatgtgggagatacagtaaaataataaatagatgctatcaaggttcatggaaatgttgagttcagtatgcaaaatgtcatgtaaatagacgtagacaataatcattttaatttgttgatctgagtggggctgaattctaaatatagactttgattcatctgcataaggaagctggattatggataaaaccatctatgaacaatgtataaagtgtgaaaaaaagggataaggtcaaaatattgtggaacacatttaaaggtctgagagaatgaaagtccacagtctaaaagcagtaggagatgtaggaaaaaaactaggaagtggtcctttatgcaaagcaaaagaggaaagtttgaagaaaatgagttgattgaagttgtaagatgtcacagaagtcaagaagaggtctctgaagtgttcattggactggtcattatgatgtcatgagcactttagcatgagcagctttagaagtgtggttataggagaagcagtgaattaaagagttaaagtaattaagaaaacagagacagaactactgagtaccccccaaaagcaattatcttcaaaatatggaaaaccagattgggatacaaaaaggtttcttgttaaagataaaggaggcctgagtaagtttatatctcatgggaaaatggtaccagagaagaaaaggttgaagattagaagagttgaaaattaaagggccaaggctggttttttgttggtttgttttgttttgttttgtttttaaagagggttttactctgtcgctcaggctggagtgcagtgatgtgatcactgctcactgcagccttgacaccccgggctcaagcgatcctcctacctcagcctcctgagtagctgggattacaagcacgtgccaccacacctggctaatttttaattttttatagagatggagtctcactgtgttatccaggctggtctcgaactcctgatctgaagtggtctgcctgcctcggcctcccaaagtgctgggattacaggtatgaggcactggactgaggcttcttaaatggtggcaaggaacatattttgtgctttaaatgatttaagtatttaaagatcatagttttcctggcaacttactgtagagatcacttcagaatttccctgggtagagtagtgtgctgtagaagtatagtgttgtaagccagtgtggattgggagtccataccccttatttatctattctgtgtatcctattaataacagtaattatcaggttattttgcctttgaacaccttagtaagtctgagcatttacatggaaaaaatgctgggtttattcctcctgttattgtattttacaagtctgtcgagggtccacagtgatctttgccccataattgtaaaatgagatattagaatcatccttatttatcttaaccacctactccactgtacagttcctataattccacaaacttctctttatattggtttatgccttctttagatgattgtgaataagagtattatcttaacctctctggtgggtctacttctgtaacggttgtgggtcatgaattattttttactcagacataattatctttggtcttatataaagaaaaccctacagactccaccaaaacactcttggaactaataaacaaaataaagttgaaagataaaaaatcaacttacaaaaatcaatagcatttctatacactattgaactatctgaaaaataaatcaagaaaaccatgctatttacaatagctatgagaaaataaaaatacttaggaataaatttaaccaagaggatgaaagacctgcaagttgaaaactttaaaacattgatgaaagaaattgaagaagacacaaataaatggaaatatattttatgttcatagcttggaaaaattaatactgtttaaaatgtccatattacccaaagcaatatacaaattcaatacaattcgtatcaaaatttcaatgaagtttttacagaaatataaaaaacttccctaaaatttgcatggaaccacaaaacaccccaaatacccaaagcaatattgagcaaagtaaataaataaataaaacaaaacatacaaacaaaaaaatgaagctgaagacatcatactacctggcttcaaaatatacttcaaagctataataatcaaaacagcatggtactggcataaaagacatgtagaccaatggagcagaatacagctcccagaaataaatccacacagttactgtccactgatttgcaacaaaagtatcaagaatatacaatggaaaaaggacagcctcttcaataaatggtggtgggacaatttgatatccagatgcagaaaaatgaaactagacccttatctcacactgtatacaaaagtcaactcaaaatggattaaagacttaaacatagacctgaaattgtaaaactaacaaagaaaacacagtgggaaagatgaaagatcaataacactgatctgagcaatgatgttttttatatgaccctgaaagcacaggcaataaaagcaaaaatagactaatggattgcatcaaactaaaaagctcctgcgcagcaaagaaaacaagagtgaagggacaatccacagaatgggagaaaatatttgcaaaccacagatctgataaggagttaacataccaaatatataaggaactcaaacaactcaatagtaagaaaacaaataacacgatttaaaagatgggtaaaggatgtgaatagacatttctcaaaagaaagcacacaaatgaccaacaggtatactaaaaaatgctcaacatcatgaatcatcagaaaaatgcgaattaaaaccccaatgagatatcacctcacacctggtagaatggctattattgaaagaggaaagataacaagtgatggagaggatgtggagaaaagggaactcttgcacacggttggtaggaatgtaaattagtacaatcatagaaaacaatatggaggttactcaaaaattgagactaaaacaactatccagcaatcccactactgggtatatatccaaaggaaatgaaatcagtatgtcaaagacctatccgcactcccatgttcattgcagcattattcatgatagttcagatatagaatcaacttaggtgttcatagtggatgaatagataaagaaaatgtgaaatatatatatatatatatatacaatggaatactcatcagccattagaaagaatgaaatcctgtcattcgtgacaatatggatgaatctggaggtcattatgtttagttaaataagccaggcacagaaagacaaatactgcatgatctcattcatgtggaatgtaaaaaagctgatcttatagaagcagagagtataacagtgattaccagagatgggtagggcagtagtaaggaggagagattgaggagaggttggtcaatgggtacgaagttacaattagataggaagaataagttctggtgttttattgaacagtagagtgtagttaagaataatgtatatttcaaaatattatagaatagaggattttgagtgttctaacttcaaagaaatgataaatgtttgaggtaatggatatactaattaccctgatttgatcattacacagtgtatatatgtattgaaacatcagactgtagcccataaataggtacgtgtcaattaaaataataaaaatagtaaaatgtatagttacttccacggggtagaaaatgtggtatatattcatggtatactacacagccttaaaaaaagaaaatcctgtcatttatgacaggaaaaaaaaataagataatccaatgtaccatttgttgaaaatactttttctttttattgcattatcttgacatctttgtaaaaagtcggttgaccataaatgtgtgggcttaattctggactctatttcactcctttgatctatatgtttatcctttcactaaaagtagactgtcttgatattgtagctttataaatttgaaaatcagctgtgaaatcctccaaccttgttctacttgtaaacattgttttggctattataggtcatttaaattttcatataaattttagaatcaacttttcaatttctacaaagaattccgctgggatttatattgggaatgtttttaacatttagatcaatttagggaagatttggtatcttaacaatattgagtcatcagatcgtatgaacatatatacctccatttacttgggtctttaaaaaattgtctcagcatgttctgtagttttaagtattgaggtttcaaaagttttttgtaatacctattcttatgtattttatggtttaaaaaattctattgtaaatggattttaaacagacttttaatttgcagagactatttcttcctttccaatattaatatttgtttatttattttgtcattataatggctaggacttccaggacaatataaacagaagtggtgagagcagacattcttgccttaaccctgatcttatgagaaaagtgttccatattttacaattaagtatgtgctactcataggtttttcccaaatactttattaaatttaggaagtaccctttctggtttgctcagagttttatcatgattcattgttgaatttcatcaattttcttttaatctattgatatgagcatatgatttttcttcgttttactaatatgttggattacactaattgatttttgaatgttggaaaaaaccttccattcctagggtaaatcccacttagtcatgatatattatcttttcaaacattgttagatttaacttgtattttagtaaatatttttacatctgtgttcatgtagaatatctgtaaataattttgtaaagaatatcttttcttcttgaggggtaatgttttcattaggttttagtatttctaacctaataaaatgacttaggaggtgttccttcctctattttctgaaaggttgtgtaatattggtgttatttcttccttcagtgaaacattctgtgccagggattttcttttagggaaagtttctgataataaattcaatttctttcatagactttctattaaaaatgttaacactatttatattttatttcatgctctgtcaattttgttaagttgtattttttaaaggatttgtcagtttcattcaatttatcatatttttggcacaaagttgttaataatattctctcatcttttaacgtctgtataatctgtagtgataacatctttttcatttttgatattggtgatttgtgttctatcctcttttttatcaataagtctagctgagaatttatcaattttgctgatttttttcgaatagccagcttttggctttgttgatatattttctattgtttggtttctatttcattaatttctgcttttgtctgtattatttgccttcttatattacttcgggtttactttgctctcttttagattttaagtggattcttaggtaactgattaggtaactgacatttcttctaatataaaaaaattaaagccacgaatttattagtatgaactgctttatttgcattttactaatttttatatgtgatgtttttatttttattcatttaaaagtatgttctaatttccattatgatttaactctttcacccatttattacttaggagtgtgatcaagtttacaaatatttttggttttcctagctatcttgttgcttttgatttctaatctaattctcttttggtcagagaacatactctgcatgatttcagtcttttaaaaatctgtttagacttgttctgtggcccagcaacagtctatcttgatgaacatatcacgtgcacttgaaaagaatgtatattctgtaattgttgggtgtaatgatttataaatataaattattgttatccagattttctgtgtctttatttttttgtctagttgtcctatcaattgctcagagagcagtgttaaaaatcacctatcatcattgtgtttatctctttgtgcccatttttgcttcatgtaatttgaagccctgttattaggcacacacattgatgattattataatttcctgatttattgatccttttatcttcataaaatatcgatttgttgctggtcatactttttttcttgtagtagcttttgtgtgatattaatgtggccattctagtctcatgttttctgttttcatggcatattgctttttgttcattttacttttgtttctttaaagtatgcccttgttgaagcgtattgttggatcttgctgttttacccattttgataatatctgctttttaactgaagtgcttagcccattcacattagtgtaatatttgatatgtttagatttgtgtccttcaatacattatttgctttctatttgtcccctctgattttgttcttctgtttccgcttatctgttgtcttttgaattatttgggtattcctcagaatctcttttaatttttagatataactatttttagattttttttaatttgcattttttagtggttgctgtaaggattacagcatacatacttaacttttctcagtccacttaatagtgtacaaccttcataaaatatagaaaagttacaaccatataagactatttagctcttcctgtgccattgcttatgctatagttttcatttgtattaaatctcatacaatacaaaacccacaagacacagttataatttttgtttaagcagttattatgtactttagagaattaagaaggaaaaaaatagtcatttctgtttacctagtcatttaccatttctagtgccattaatttgttcctaaagagctgagtttatccataatgtctttttgcttcaacctgaaaaactttacttagcagtttttgtaatgcatatatgctgcagtgatttatcttagttttcctttatctgaagatctatttatcttccatttgaatgatatagaattctgggggattgacagattttattttcttccacttaaaaaaaatgttattctactgtcttctaatgctcatagtttctgatgagaagtgtgtagtcatttaagtcattattccctgtgtgcgatatgattgtttttgttgctcttgcatggctggggggacacttattttaaggttttctacttacctttggtttagaagtttgactatgatgtgcttatttatgcttttctttatttttatcctgtttatggttggctgagtttatcaaacatgtacatgtatattgttaaccaaatttgacaaatttttgttccttatatccttaaattttttaatcctaatttctctctatcctttctggactccaattacatacatatggtactttttaaatattgtctggttttaccatagtagggttaaagtttggtcctttaagactatacatttctttcatattcttgtatattctatattgttcaataggtctctgagatttattttatttttattttatttcagttctttttcttttcttcagattggatcatttctattgatctattttcagattcattgacttttgcctcttttagctccatttttcccaagatcaggcagtgagttttaatttcaaatattatatttttattgctaaaatttccattggctttcttatattttcctttttttctgataagatttcctttattttcattccttaccaataagttttcctttatcttattgaatatagttatagtagctactttaaagtcattgtccgctaattcccacatctgtgtcatctcaggtttggattcttgatggtctttacctttaggaatgcatcacatttttctggtattctatgttaggtaattttggattatatcttgatattattaatgtgttattcttgagattcatcattctgtttgtgttagtccattattgcactgttataaagaaacacccaagactcggtaatttataaagaaaagaggtttaattggctcacagttccacaggctgtaggaagcatgatgccggccatctgcttggcttctggggagccttcaagaatcatggtggaaggcaaaaggaaagcggctcatcttacatggccggtgcaggagcaagggacggggggaagtgctacgcacttttaaacaaccagatttcacgagatctctctcactgttatgagaatagcaccaagggggaaacctgccccatgatctaatcacctcccaccagggcctgcctacaaaattggggattacaatgtgacatgagctttgggcggggacacagatccaaaccatgtcattctgccactgccctcaccctccgcgaaatctcatgacgttcttacattgcaaaatacaattatcccttcccaatggtccctcaaagtctgaactcattccagcattaagccaaaagtccaaagtccaaagtctcatctgagacaaggcaactctcttctgcctatgagcctgtaaaataaaaaacaagttagttactcccaagatacagtgcgggtacaggcattgggtaaatactcctgttccaaaagggaaaaaccagccaaaagaaagaattataggccccatgcaagtccgaaatccagtagggcagttattaaatcttaaagctccaaataatcttcattgactccatgtctcacatccagggcacactcgtgtgagggatgggctcccaaggccttgggaagctccactcctgtggctttgtggggttcagttcctgcagctgctctcatgggttggtgttgaatgcctgcagcttttccaggcacagtgtgcaagctgcttagaactgctggtggattcccattctggggtcttgagggtggtggccctcttctcacagccatttcactccagcctgggcaacaagagtgaaactccatctcaaaaaaaaaaaaaaaagaaagaaagaaatttcctctgccaggtaccctaaactcatcattctcaaatttaatgttccgcagattcctacagcacaggcataatacagccaggctctttgctaaagcataaggaaagtgacatttgctccagtcctcagtaagttcctcatctccatctgagacctcctcagactggacttctttgtccatttcactatcagcacttcggtcccaatcattcaagtagtctctaggaagttctaagctctccctcatcttccctccacactattccaacctgtgcctggttacccagttccaaagtcactttcacattttcaggatctttatagcaatatcccactctcagtatcaattttctgtactagtcttttctcacactgctataaaaacacctgagactggataatttagaaagaaaagaggtttaactggctcgcagttctgcaggctgtacaggaagcatgatgctggccatctgcttgtcttctggggaggcctcaggaaacttacaatcatggtggaaggcaaaggggaatcaagctcatcttacatggcatgagcaggagcaggagcaagagagagagaagggggaagtgatacacacttttaaacaacaagatctcatgagaactctctcactattatgagaacaacattaagggggaaatccacccccatgatccaatcacctctcacaggccccatctccaacattggggattacaatttgacatgagatttgggcagggacacagatctaaaccgtatcactgttatatttctatgaagggtgttgacatttttgttttagtagagaataaacttgattagactaaaaatgcaaaatctttcttgcttctgcttggtagcagttcaaacttcagtttagttcttttagctttagcctttgctctttatatgtgattcagggacggcagagatgtgggaagaatttgatcatagaatttagggctcaccttcttttgttctgtgcactcaaggattctctacccctctcagttgtggattacagtgctgttgctcctggctcctcccctttgtccttaagctggagaaactagggattatctgtcagagttttaacttcctcatgctgtgtcacaaccttgatcagctattaggccaaagcaacaaaaacgggaaactcacttcatgctgattcttttctccaagttttagtgccctcctctcccaaaactgcctccttttgtttattccccagagtccttagatatttgctttatgtattttggccaggagctatagttgttatctctggaagggtctgtttattatgagcttactttgatctactagactgagcttcagacattgtgttttgaaatttttgcttaacattacatttatccaagaattaaatttaatatttatttatttttttcttcaacttttaagttctgaggtgcatgtgctagttgtgcaggtttgttacccaggtaaacatgtgccatggtggtttgctgcacagatcaacccatcacctaggtattaagcccagcatccattaggtattcttcctgatgctctccctcccattgctcccccaacaggccccagtgtgtgttgttccccttcatattttcatgtgtactcatcattcagctcccacacatagtgggacgatgtggtatttggttttctgttcctgcattattatgctgaggataatggcttccagctccatccatgtccctgcaaaggacaagatcttgttcctttttatggatgcatagtattccatggtgtatatgtaccacattttctttatccagtctatcattgatgggcatttgggttgatcccatgtttttgctattgtgaatagtgctgcaatgaacatacacatgcaggtatctttataataggatgatttatattcctttgggtacatacccagtaatgggattgctgcgtcaaatggtatttctgcctctagatctttgaggaatcgccacacagtctcccacaatgagtgaactaatttacaaccccaccaacagggtaaaggtgttcctttttctccatctgttgtttctggacttgttaataattgccattctgactggtgtgagaagatatttcattgtggttttgatttgcatttacctaatgatcagtgatgttgaggtttttttcatatgtttgttggctgcatgactgtcttcttttcagaagtgtctgttcatgttctttgcccactttttaatgggcttgtttgggtttttcttgtaaatttgtttaagttccttgtagactctggatattagacttttgtcagatggatagactacaaaatttttctcccattctgtaggttgtcttttcactctgatgatagtttcttttgctgtgcagaagctctttaatttaattagatctcatttgtcaatttttgcttttgttgaaattgctttaggcacttttgtcatgaaatctttgcctgtgcctatgtcctgaatggtattgcctagcttttcttctagggtttttatagtttcatacttttatgaattacgtctttaattaatcttgagttaatttttgtataagatgtaaggaaagggtccagtttcaattttctgcatatggctagccaattctcccagcaccatttattaaatagggaatcttttcctcattgcttgtttttgtcaggtttgttgaagatcagatggttgtaggtgtgtggtgttatttctgagttctctattctgttccactggtctacacgtctgtttttgtaccagtaccgtgctgttttggttactgtagttttgtggtgtatatgaagtcaatcaagtagcatgatgcctccagctttgttcttttgcttaggatcggcttggctataaaggctcttttttggttccatattgatatggtttggctgtgtccccacccaaatctcaccttgaattgtagttcccataatccccacatgttgtgagagggacccagtgggaggtaattgaatcatgggggcaattatcccatacagttctcatgatagtgagtgagttctcattaggtctgatggttttataagggctttttcctttttgcttggcacctctccttcctgccaccatgtgaagaaagacgtgtttgctttcccttccaccatgattctaagtttcttgaggcctccccagccatactgaactgtgagtcaattaaacctctttcttttataaattacccagtctcaggcagttctttatagcagtgtgagaacaaattaatacacatatgaattttaacatagttttttcgaaatctgtgatgaatgtcaatggaagtttaataggaataccattgaatctataaattactttgagcattattgccataacactgattctgtctatccatgagcatggaatgtttttctatttgtttgtgtccactgtgatttccttgagcagtggtttgtcattctccttgaagaggtccttcacttccctttttagctgtattcctaggtgttttattctctttgtagcaattgtgaatgggagttcattcataatatggctgtctacttgcttgttgtttgtgcataggaatgctagcaatttttgcacattgattttgtatcctgagactttgctgaagttgcttatcagcttaagaagcttttgggctgagacaatggggttttccagatataggatcatgtcatctgcaaacaaagataatttgatttcctctcttcctatttgaataccctttatttctttctctttcctaattgccatagccagaacttccaatactatgctgaataggagtggtgaaagagggcatccttgtcttgtgctggttttcaaggggaatgcttccaggttttgcccattcagtgtggtattggctgtgggtttatcatatatatggctcttattattttgagatatgttccttcaatacctagtttattgagcatttttaacatgaagggatgttgaattttatcgaaggccttttctgaatccattgagataatcatgtgggttttgtctttagttctgcttatgtgatgaattacatttattgatttgcatatgttgaaccagtcttgcatcccagggatgaagcctacttgatcatggtgaataagctttttgatgtgctgctggatttggtttgccagtatcttattgaggatttttgcattgatgcttatcagggatatcagctggaagttttcctttttgttgcatctctgccaggttttggtatcaggatgatgctggccttaaaggagttagggaggagtacctccttttccattgtttggaatagcttcagaagaattggtaccagctcctctttgtacctctgatagaattcagctgtaaatctgtctggtcctgggctttgtttgcttggtgggctatttattattgcttcaatttgtaatttaatatttttaaatcttgggttaaatggttgaatgaatgtgtgaaaagttagatatcaatgaatgaatattcttaaatgtataaactttaatcttgctggatataggataaaatttacattaaaacactgtaattaatcagtcaatttaagtaaaataaattcaaggaagtggtctgaatttctcagtgagcatttagatatttatgggagtcatataaaataaattataaatgtgactgagggctttttattaaggaaaatgaaatattgctatggacatgattctgtgtgtttctttactacactatgaactaaaaattttggagacaaatctaagtatataaattggtttattgatgaccgattgggaatataaataggcacaaaaatttggcgaagcattttggcatgtctacctaaaatttaaatatgtaagcactagtccccccttacctgcagtttcactctgagcagtttcagaaaataggtgagcacagtacagtaagatattttgagagagagaccacattcataaaacttttattatagtgtattgttataattgtcctaatttattattattgttgttaatcttttactgtgcctaatttataaatcacactttatcataggtatgtatgtataggaaaaaacatagtatatgtagaattcagtattatccttggtttcagacattcagtggggatcttagaaagtattctctgtggaaaaggagggactactgtacttttaacaaagcacttcccagaataaacacacagacatatacatgcacacactttcagaaatgcacttaaatattcaatcatggagtaaaaattaattatgaaatatctagacaatgaacattatgtagtttttattaagaaagaagcagaattatatatactgacatgaaaggatgttcattatatatgttaagtaaaaactaagttcatcatatatgttaagtaaaaaaaagtcacaaattaagagaaagtgttaattgatttgagagtttgtgtattttttttcctattttgtgctgaaaagctgaagttggcatcaaccaaggcatattgttatctatgtatcaagctaaataatttaaagatctttaagactattaattcagagatgctgtataaatagaatcagtgccagattttttgtttcaattctatcagccaagtatactatgctttctttgcttgtgatagaaaaaagagagaaaaaacacagaagcaaaaagtaaagttgtacaatagtgtgtagagtgtggttccattttgtaaaatgtatcagtgtgtatatttatatagcatagtcaaaagcctggagtgatataaattttctgttactggtctagtatacaagggaattagattttaaaggactttcattgtttttaacaattctgaacaaatttaatttggtacaagaagtatatattttaaatattattgaacttaattaaaataaattagagctcaaaaaataaataaatcacaggaagttcacagtctgactttatcaggaatgttgctattttcttaacaggtcatcaaacattatcactgatgcttggaaagaagcactttttataatttaaaaataccttttattcttcaacttctgctggcttaaagagcactaagtccacatatcctaggaggcatggctgtccaatatatactatgtgtacattgatttatgaaccaataaatgtttcatacacagttgagattttaaatgagcttatgataattggatcaaaggaatactagtccagcttgagagtactgcagaaaaccaatcacagaaagctatgatgaaattttaattataaaggatattgaatatcctagagtgacaactctgttataataaatgtaacactgaatgggaaagagagaaaggagatttttacccatttctgtttgaaatcaactttctatttctagtaaattatcacaccattctgttttaatttttatatcttaaagttatcattccagtgtctttggtttactgggtttataaaagaattgaccagtagctatataatagatacagaaaagtctgcctgggtgtggtggctcatacttgtaataatattatattattataattgttctattttattattagttattgttgctaatcttttactgtacctaatttatacattaagctttatcatgggtatgtatgtataggaaaaaatgcagtatatatagaattcagtattatccttggtttcggacattcagcaggggtccgaaggtgggcgaggtgagcccactttgggaggccaaagtgggcagattgcttgaccccaggagttcaggaccagtctgggcaacatggtgaaatgctgtccttacaaaaaatacaaaaattatctgggcatgatagtgcatgactgtagtcccagctacccaggagcctgaggtgggagcatcactgagcccggtggttgaagctgcaataagttttgattatgctactgcactccagcgggacaactgagtgagaccctgtctcaaaaaaaaaagtcacaaattaagataaagtgttgattgatctgagaatttgtgtatttttttctattttgtgctgaaaagctgaagttggcatcaatcaaggcatattgttatatatggatcaaactaaaaaattttaagatctttaagaccattaattcagagatgctgtataaatagaatcagtactagattttttgtttcaattctatcagccaagtataacatgcttttcttgcttgtgatagaaaaaaagagagaaaaaacacagaagcaaaattgaagaatttgtaaatcatttctaaataatttcaataaaatgagctttgaaagggaaaatttttagataacattatctcatcaaaatgccttaaagtatattttaatattcagtaagaacagtgtatattaacatggctaatttagaggatttatattttacccacatgataatgtattatgcctgtaactgctaaaggaattatgtagcaaaatctgtcaaggaatacacgagtgggatttatatcagaaaaatcaaagccatttgtaaagccccattacttaggcagaatatcataggtaggaggtagatgttactgaaagaagaagttgggatatgaaatacaaatctattttgcatcatgattttgttaagtccggctgtttattattaaaaacatgtacagaagattcaattgaagtttctaaaagagaaagaaacttgtagttgtgggaacaatagtattccttatgaaatacttagatattaatagcttgagactgataatacaattcttaagttaggggttgcatgtgtagtggtcagatgttatttcaggatctcaagaaacagagccatggtaaaaagaagcttcctggagcttctgataaattccgtcacctttttgggacccagtttcttcatcaataccaacctcattagggtcctgtgagaagtacatgaggtgagatatgtactgaaataatatgccaactcttaagtgccaagacattaggatgcaagggggggtgcccaaaaagtcaacaattacttgatactctagatatatgtatggataattttgagaagtaatccttcttacacagaggtgtaggtttgtttgttccaagcagcaaacataatgggtataggaaagagaaactgtggccttcatatagactgagcttaggaaaacagttggaaaacagttcaaattcaaggtacttcaacaatatctagtgtgtttttgaaatatatttttaaaacccctatccaaatcaatgaatgctttggctaaaacctacttgggaatgagggtgttctttagtgccaaatactcatcttattttagtccatgattttagtccatggctaaaatcccaagagttacagaggagaaatagggccaaacaaggtttctattaaaataagaggtcccaagtgatgaatggaaacttggaacaggtttaatggcaactataagccagaaattagctgaaatacacactaatgaatttggggcatatcttgagtttcagatagaaaattggtactaagtttagtgaattagaaacatagcttaacctaggcagttgcaattcttgttccaaaaatgctcaatttgctgctggactgcatggacacttgctacctccttgttttgagtcattaacaaaatgttgaatgggatatctggagtatcaagtaattgttgactttttggtcacccaacccccttgcatcttaatgtcttggcacttaagagttggcatattatttcagtacatatctaaccttatgtactcctcacaggaccctagtgaggttggtattgatgaagaaactgggtcccaaaaaggtgatggaatttatccgaagctccaggaagcttctttttaccatggctctgtttcttgaggttaaagaacatgatttaccaggctctgtttcttgagagaccaagagtggatccctgtagtccccattagaattctccttctagtttgaactattccattagtaaacactttttggcatgttatttaaacaattacaaaatcacctaactacactgtcttgcagctgcctttctttttttgtcttgtccacgtgagtatattgggagactttgtttaatgtctccacaaattctagatagactgttcctgcagcatttctttttttaaattttgttttgataagcatttattttggcaatgattctagtaaatgaaactaaagtgcccatatgaaaaacaatcttaagtctatgtggttagtttgaagttaccagtttttaattaagccggagtagtccttagtatgaatgccttcatttctaagtgctcataaacaatcactttagtaatattacagttttgaaggaatttatatcaagcttaatggcactttttaaaagataggaaattgggttctctagtcacatctgtaagttatttcagtgccttggaagatcatttatctggccacagataattgacttacttacatcagttttttttttttttgagatggagtctcgctctgttgcccaggctggagtgcagtggcatgatctcggctcactgcaacctccgcctcctgggttcacgccattgtcctgcctcagcttcccgagtagctgggactacaggcacccaccaccatgcctggctaatttttttgtattttttagtagagacggggtttcaccatgttagccaggatggtctcgatctcctaaccttggcctcggcctcccaaagtgctgggattacaggcgtgagccaccacacccggccacttatatcacttttatgcttcctatctccttattgatcttgaggttcaagtttcacttaaccattttcttcaatgaaaaataattttataatttaaaaaacctcaacctttaatattctatgattcttgttaggccatctcaattgagaatactgataaagaagtaaaactccccccaatactggctagtttgattttatctgttaatattacgcaatctgccccaaacctgtctctccctttttattgttacttatccaaagatggcttgaatctcttatggcttgaatctctttgtttattctaagcaattttcagacacctcagccaactatcaataatatattagttttttagaactaaaaatgtagaggatctccccctaaaagccaattgttaatgccaaatatttgactgatatatttcttctggaggaagggagatgtgaaaaaatttagccatcaagttatgtgaaaactttttcatcttcccatccactggatgttttatctgtaaataatgctataatcatattggaaagtattttccttctggggatgcatgaagatcaggaatcctattcgtttttaacaagatggaatttttaaaaactactttggacaactctaaacatcagagatgaccatttgtctcttttttattatataacttgtgctcggtttgtagagcaacataaatacatgaattaaaaaatgaaaactagctccttccctatttgacagatacttctcaacctcctctccataagatatgctctatccctatataggaaatttttctgtagcagcttgagtttactaaaaataagatctgaagaaaatgaagcaattaacatttattgagagtctataagggtttctacattgtgaaggagacagaaatataagacatggctcctgctttcaggttgcttataattaaagagataatattaaattatttggatgaatttaaaaatgacacatgccatcttacagatatgctgtagactgtgaaaatgaaaaaaaaaacctcgtgtttagagtagacactgtttgatggattaggtaggttttcatctggactttgaaatgtatgtaagattttataaggaggagagaaaataagaagctgtttgtattagaattacacagataaatttgtaaatttagttcttttcaaagaacattaattgagcacctctgtgccaagctccctactggatgctgtagattacagcatgtttaggaactaacttcatactctgttgctaaagtatttctgtgttttctaaaaaggtaaatctcttgtgaggaaacaaatctcttgaaggggttctcataacagaagtcccatttacttcatgatataaaaaggggctgttttctggttttgttctcaaaatgtaggatatagttctagacgtaattgggaaagcttaactttgttgcatacgcatcttccctatcatggttgatttcctatatggcatagttaaatgtgtttatccgtgtttgatatctaaagggccatgctacatatagactgccaactaaggttttatctgatgataataaattgttgtatttcatgacgacagcaacaacaacaataatgtacttaactagtcactgtgcaaattgctttacatacattttctcatgtaatcataataataaccgtatgagttttgcttactattgttttccttaattaaaatgagtaaagtgaagcttaggctaagtaacatgtccatagccaaacagttagtcactggcaggagtgtgactgactccaaagtctatattcctaattactgtgttctactttttaatagagagctcttgaaggtccaaggaaaggaatgcataatggtgtggtcaaggcattagtgttaatatttgtagaaagggtaattaacaacagtctgagcaatcacattctaacaactagtaaggttggcaggagcctcagtataatggtgtgaggaacgaaatcattatagtgccaaatagagtataccatctctttagtacaatgtctttcaaaatgaggctgattgtgttggctttatatttgactccttaataattaaggcagtaaattctagctggagctaaatacctacaaggcctaaaacagcataatggacaacctggcaggtgtccttgctggaagatgacaagagtgctgaaaggagagtcctggtttttctcccaagacatgacatttgggggcttccattaaaaaattaccaagcctctgccactgtaatctcttccttaagtgcctatgattttttcacagtcacaggtctatgcctggtcaatacccagtggccaggtctctgagctgcgtgcagagatggcagcgacttggagggctgggaggagataaggggaggaaagatcacttttcatgacaacttacaacttgattccacttataagccatttattttcagaaacaagtaatgggtgaggacacaggccaggtccacaatttgtgcacttgagagattaaggcctccgagatcaaattaccacagcaaactgagacagaattattgtagggatgtttggggaggatgcagagagaagaggaagaagccagagacccaagaaaggagacaggaatagattttgatgaaaattgcttcctactctgtacccttgaggaaacaaagaggacaaataagaagcagcagtgataggaggctgggcgcttctctggaataacactggctaggtagtggagcattgatagtgagtgtgcttggttggtggaacgaagggatgtgctagttcaggcctttgaattctgggtgtcaggatcacaaccttggctcctttaactgtccgctctaggagggaagcatgccaaatgtcaggtctcactctgactttgttccagtccatagctagaaaatgacccatagaggaagatctacagatgacagaatactgggagatgaagagaaaggacgttttagtgagtgctttttttgcacatgaggcaatagatttcaaattcctgtggaagaaatgtgagaacctgggaagagtgaatattcagaactgagcagcagaggcaatgacacagcatggaaagatttcctctgatccttctaccttctcttttactgaagtgaatttgttgtctctgtgttgcctctatagcagtacaagaggaaacttggggacacagaagaacagaagtctaaggagtcttatatttaaggaagataagctgcagtcattgaaattgctggttattgtaagataaatcccagactcccacattttgcttaatgacagcagatttttttttttttttaactgcaaagcattaatggaatccaaattccagcctggcttaggagatcaacagtaacgctcttgatttaatggttttgcagactcttgaagacattgtcatccattaaagaaaaaattttaaattactcttgaaagaaaatgtcttgggtgataaatgtaaaagatttgaagcaagattagaaaaagcttgagagaagaatctctttaaaaattttaccagattttccccattgtcgccaaaatgggtcaaataatagatttgcctacagcttcatggagactatttttttaaacagagcattttaaacatttaaatattggttatttgccaaggcacacactgaaaataagggccacttggccgagagcagaattgagtcttggatcccaggatgctggttttaggcttgctcccggaaagagggcagcatttgccatccccctccttttgccctaggagttgagcactttctgcagtacttaagagtgtccagggaagatgtgggagtcaggtgaatagttcccatcgccagtaaccccagagcgcctccccctgcgttgtttccttttaatgttagatccgccgcctgggtgcccatacttagctaaggcccctcagtttattttcctgaattgcgcttggagatcttttcctggggagctgatagccagacttctaggggcttgactgcttttcccagactaatctccttaaagacccgttaagcaggggagagacggtggagactggatgaactggacagtgggggtagggagaaagggagtggccgtgttcctgcggtccgctgggatccggcaggtccagggtgaaggagatggggctggagaggctgagcagtccgggttcgctgtccgccacttcggcgcggaatcagagcaggacttgctgagccctcctaccgctccctttccccctccccctctgtcttcccttctgtttccttttccctccccctggagctgtagcggcagcagcagcaggaagccgagccgggttgagcgactcggaggcgagcggaggagctggaatatggggagtcagcgaggacggtggggccaggagcccttgggagggcctacggagggagcggccccaggcgctttctagagcgtgagcggtgggggagcaggcgcagggtggcacgagcggaggcggggcccgggcgtggggcacggctggggaagctgccgcctccggccctgcccggctgcctccgccgcggccagtggctatggagcaggcgggcaccagacctgcggcgacagagcatccacggctccggcggcccatgccctggctgctgctactgcctctcctgctgctgttgctgctgctgctacctggccctgcggcctcccagctgcgatactctgtgccagaggagcaggcacccggcgcgctcgtgggcaacgtggctcgcgcgctggggcttgagctgcggcgcttggggccgggttgcttgcgcatcaaccatctgggtgcgcccagtccgcgctacctggagctggacctgacgagtggagcgctcttcgtcaacgagcgcattgatcgggaggcgctgtgtgagcagcggcctcgctgcctgctcagcttggaagtgctggcgcacaaccccgtggcggtgagcgccgttgaggtggaaatattggacatcaacgacaactcaccgcgtttcccgcggcccaactaccagcttcaggtaagcgaatcggtggcgcctggagcgcgctttcacatagagagtgcgcaggaccccgacgtgggcgccaactcagtacagacctacgagctcagccccagcgagcacttcgagctggaccttaagcccctgcaggagaacagtaaagtgcttgagctggtgctgcgtaagggcctagaccgggagcaggcagccttgcaccacctggttctcacagccgtggatgggggcatcccagcccgctcgggtacggcacagatctctgtgcgtgtcctggacactaacgacaactctcctgcctttgaccagtccacttatcgcgtccagctacgggaggactcacccccaggcacattggtggtgaagctgaatgcctcagacccggatgagggctccaatggtgagctcaggtactccttgagcagctacacgtcggaccgggagaggcagctcttcagcatagatgccagtaccggggaagtgcgagtaattggggggctggattatgaggaagcctcctcctaccagatctatgtgcaggcgactgaccggggtccagtgcccatggcaggtcactgcaaggtgctggtggacatcgtggacgtgaatgacaatgccccagaggtggtgctcacggacctgtatagcccagtgcctgagaatgctacacccaacaccattgtggccgttctcagtgtcaatgaccaagactcaggccccaaccggaaagtgagcctgggtctggaggccacactgcctttccgactgaatggctttggaaactcctatacactggtggtgagcggcccactggaccgagagcgggtggctgtctacaacatcacggtgacagccacagatgggggaataccgcagctcacatccctgcgtacactgaaggttgagatctctgacatcaatgacaatccaccaagcttcctggaggactcctattccatctacatacaggagaacaatttgccaggtgtgttgctctgtactgtgcaagccacagacccagatgaaaaggagaatgcagaggtgacctactcccttctggagagggagattcaagggctgccagtcacctcctatgtctccattaacagtgccagtggcagcctttatgctgtcaactcctttgactatgagaagtttcgggagttctttgtgactgtggaggctcaggacaaggggagcccaccactgagcagcactgtgactgccaacgtatatgtggtggacatgaatgaccatgcccctcacattctgtaccctacctcaaccaactcgtcagcagccttcgagatggtgcctcgaactgcccctgctggctacctggtcaccaaagtcatagctatggactcagactctgggcaaaatgcttggcttttttaccatctagcccagacttctgacctggacctctttaaggtagagctgcacacaggagaaattaggactaccaggaagatgggagatgagagtggtagcactttcaacctgaccgtggtggtccgagataatggagagccatcactatcagcctctgtggccattacagtagctgtggtggatagggtttccaaaatcctccctgacactcagaggcatgttaagagccctcggacatactctgaaattaccctttatctaataatagcattaagcacagtgtcttttatatttcttttgacaatcatcattttgagcatcatcaagtgctaccgctacactgcgtatggcactgcatgctgtggaggcttctgtggagtaagggaaaggtcccctgcagaactgtacaaacaagccaacaacaatattgatgccaggataccgcatggcctcaaagtgcagcctcacttcattgaagttcgagggaatggctccctcaccaagacctactgctacaaggcctgtctgacagcaggctcagggagtgacactttcatgttttacaatacaggggcccagacaggaccagggccttcgggagcccaagcagcagtgactgacagcaggaatctcacaggccaaagtggtcagaatgctgggaacctgattattctcaaaaatgaggctgtttctcaaaatgaggtgagacagtggtcagggggtcttctacaaactcatgcatttgttacacatcccccaatatcctgtgatttggctttattgagtcattaacagtgacaagagttatctggtaaactgagtatatatagtatccacaatttgatcataatctgctatttcctctctagaaaaatagcactaaagaattgttttatttttcattttcagaggcatgaagccttgtccataaaattgtttgagaagtgaggattagtcttaatatttaatgctaaaacacagatttgtagagaaacaggacaggccttggaatagggattatgttttagggagtaatgttatgagactcaaggagaaatggcctctgctgtatcatctacagggaaatttttcttttgaaatcctatatgagtgatgtttcttaaaaagctctgaggcctctaggggctatcatagtcaccactatctgctgtctctgtttatactctggactgtctacagtggaaattatctagttaatatttctggtacttgcactgaacctatgtgataggatcctctggaaatgcatgtcacaagtgataaagctgtagtatttagacatcatactgaagctaaagtttgctttggctgtatgatgtggcaactcttctgtagagggctgtcagagggagtggatgatggtgaggcagagagattaagtaccaatttgtctggttggtccagggaggtattagaatgagtggattaggggtgtggggggatggtgaagaccaagagaagctgggattagaaggaagagaagggaaaaagaattctcccaatagtcacctttcttggcatactctgaattcattgtaagaggatttccctgaatttagcttaaatgcagcctgtaatcttctgattttctgttgacagtttctatggttttgatgagatgtaaagtagccttttcaagtccttcatgtctttaagttaaatgacagtacttccaaagcatgcattcattttctggatctaaaatttgatttgctatagcttcaaaaggctggcttggaaagtggatggcttaccctacagtaaggtgtagaggcaggtgttagtatatgcactagttttgagatttaagtaggtataaggccagcttgttcattattatgaagaatgtacataaattattagaaagtagatgaatatgtgtgtgtgtttgtgttgtgtgttcgtctccatatgtatgcttgaaataacagagatatgctttgtgatacttaaaacttggatttcaaaagccaaaattttgtaccataaatagtgatgaattgttatctttccaaataactactttgtagaaagggcttttagagctactacacaatgtgtgaacaatatttgtctctcctctattttttgcaatatattttcattgacatattgctgtacatacatattgtatgtaatatccatattgttacatttcaagttcatggtaatcttgaggaatgtaatgcacaggcacaaaagttccattcctgattgagagtagatttttctcatggacatttcagatagatttattcatttatcagaagtgcctggtgttagtcaatgctgagaaaccatgggaggcagattgtagattaagaaaaatgggggaataaatcaaagagtttccagaagtctttagatcgtagcatttgaaagcacgtaaaagggtttagctttaaataaggttgctgtagacatttgcttaacaaattcttgtgaagccctttgggattggggtgggctacaggtggtgaagaggcatgaacaagtcaggccaggctcagctttgccaccagctgtaagccggaagctcagaggaaagacactgttaccctccctctcctgactcaaagcttggggcaatttgatacataaactatttctgtcttacactgacctgtatattaatatgtactttggtacacaaacatttaatctagggagaaaattatttcagaaagtgcttgcttttgggagattttgccaggagagtgcatgactttaataaaggcaaatttctgccaggcacttttggaaatccagtgaagaaccccaagatctacagctccagaaatttttgcagttatagggagagagtgtcacattgttacagtgtggcaagataggagcaaaagccactcagttctgaaagtcatcattgccagatcaacctgttaaattcccatgttgggctttctttttttcctacctagttactacagatggcaggagagtcctggggtacaattagtaccatgtgcctacattaaaagtagatgggaattagagaggaagagtaagggaatttgtactcactaaccaccctgctatatagatatatgtatatcatacatatacacatacatatatctcatattactgaatcttgaatattattcaagattattcaatatattgaatattataatattgaatacatatatgatttcattacctgcaagtcatgcgttaaatatttgttaacatctagcatatgaggaaataagctcagggaggttaggtaatctacacagccacactgctagtgttattttaagttgtatccatctgactccaaaaactttttttcaatactatgagtagacagaagttccaatgtttatattcccttttatatgggatattcaggcatttaagctatcactaattcacctagtcgtatatattaactgcttttggaaaaagagtaatttctggcatagaagcaggtaacaaatgggaatatcagtgagttactactatttttttatttttatttttttgagacagagtcttggcctgtcacccaggctggagtataggtgtgaatatggctcactgcagcctcgaccttctgggctcaagcaatcctcacacatcagcctcctgagtagcttggaccatagatgtgcgccaccgtgtctgactagtttttaggtgttttttttttttggaagagatgggggtctcactatgttgcacatgctgttagtatatttgtatttgtttatttgcttcactattggcaaaccctgttaagatcttttatttttattatttcactgatttttctcttgttgcttattaaacatcagcatttaaccccagactctaatctgttggtagattttacccccagtgagcttatttcataaatcacttgtgcagtgaggattctgaagtaactatttggcaatagggcagaatttctctttggaaatttctgaacttgatactgaatgttgttggcactcccttcagagtctccataaaaagaaaccaaattttttttttttttttttttttgagatggagtctcactctgttgccaggctggagtgcagtggcgtaatcccggctcactgcaacctccgcctcccaagttaaagtgattcttctgcctcagcctcctgagtagctgagattacaggcacgcgccaccacgcctggctaatttttgtatttttagtagagatggggtttcatcatgttgtccaggatggtctcgatctcttgaccttgtgatccacccgccttggcctcccaaagtgctgggattacagatgtgagccaccatgcccggcaaaggaaaccaaatcttaaggtagattctgtgcatttgtggtcgtggtgttgtgattgttaatgagtcactttgagtactctagtagatttgtccaacagtgtctcagtgggcccagctggcacaacatgtagaaattatgaaagagtagcagagatgaattaagtttgcattcactttcacttattttaaagcaatttgtagtcaccaaaccttcagttatttctgccactatgtgtgcatattcaccctaattccaggtatagtgacctgaaagagttaattcttctttcagtggcacctacttttatttcccccagcactgatttttctatctgatgactctatcctggaacagagtttacactcgttgtaaagtgacatagtagtgaatttataaaaattgcacaatggtcagaatagacaaagaaatcatatctatgagcttccactccagtttttcatcctctgatggtcactttataatgactggggctgttttagtttgcaaatttcatattggtcacaggactcttcttctgagaaaaagtttattttctttggtctgatgatacaataatttatttcaattacctctttcctcaatttttctacagactgctgagccagatggaattatggctgagctcttctctgtttctgtatcttgtacacattctgactgaagaagaaatctatttattgtagcttgaatgtcattggcctactgtttccttctgacccaggagtgagccatcacatgggcatctggtctaactcagaacactctgcagggacacagcctggcatattataggttgcctattggcatgctgtctacttgacagaatagcaaagtcagttctgggtacttgcttgttgcctaccaatttttgctctcaatgagaggtcagaataatgtcaatttgcaaatgtttgaggaaacattcctgtcaccaaacccagaggtttagctgaatatgatggcattttacaggtgtctttaaatgtggcttttacagaacttcacctggatcaatgttttgtgcatgtgataatacaactataaatttagcttattaatatgataatatttggagcagtataatctataaccatgacttcaaaaatcaaaggttaaaagtattcttttgcagtgttttaaatctgctaacctgaaaactatacaagggtttttctttcaagaattttaacttgacaaatgcaaaggaatatccaacattgcaaaggtaaagagaaatcttagttccttggcatataagcaccatcagttcctttctggccttccagggtcagaactctgggctccaaggaggtacaactgtgagtgagagagtagctgctgtgctagcaggctatgcatccagaactaaacagacctagcactttctgttgtactggaacccattaggtatgttctaaagttatgtttattttactttcctggtttgtaaattagcattttaaatgactacattcagaggaaagtattccacccagaattctcaaatgtattacctttgtgttttattttattttagtttttttgagacggagttttgctcttgttgcccaggctggagtgcaatggcatgatcttggctcactgcaacctctgcctccagggttcaagcgattctcctgcctcaacctcccgagtagctgagattacaggcatgcgccaccatgcctggctaattttgtatttttgggtttcaccatgttgttcaagctgctctcgaactcctgtctccaccttggcctcccaaagtgctgggattacaggtatgagccactgcgcccagccctcattttgatatactagaagaccaatatgcaacataatgattattttaaatgttatattcccttttgccttaatgcggaacagtctatgtatcccttttctgatgatttgtaacaaattaccacaagtaagttgtttaaaacaccacctatttgttatctcacagtcctgtaccatgtggctgagttgtccgctcaggtattctcaaggctgaaatgaacacagctgggctgtgttgtcctttgcaggctcttaggaagaatctactatcgagctcattcagattgttggcagaatccagttgtttggggactgagatctctgttttcctacttactattggcctggggtcactctcagttcctagagaactgaggactcaggactcttgtcccatggtctgctccatcttcatggctggcactggagaatcttccctcacatggaatccctcttatgcttcagatctctctgatttctgtctctgacctctagacccagatttaaagagctcatgtgattatgtcagtcccatccagatgatctccctttcttaaagccaactgtgctacatagcataatgtaatcatgggaataagatccatcacaatcacagtcttggagactattcagggtgtgcacaccaggatatagggatcttggggccatcttggaattctgcctatcagtttatatcaatgttcataaaatagcactatgcaaaatctgcagtggatatattcttaatacagtcctattaggaaggaaaaggagatattatatgcagtctcatgtcccagagggcaatttgttgatgtcttccacatggatttccatggtacgaagatagcatattatttcattgagtagttgtgtgagtttattaataaaatagggtattttaaacttattttactttaaatcttagaagaggtgattcatccttctgtagctcaaatattctatgtcataaatcacagataataccattacaagataaattaaatcttttttataattttaataggaactgaagtgtattcttattcttcagtaatactacatcacccatatggactacctaattgattttttccacatatggagttttgtgaccattattctaccaaaagactaacctttgaagcaataggacatattagagttcttcaccaatagaaagtaagcatagtcctgggaggtaccatctaagtattaaagaactaaataatcacagttatttcaactgtgattgaaattgtgatagtaatatatgtcttactgtgtcagatatatcagtagtcaacttttcaacttgaatttttccaagtttaatcaagttctggatgaaactcatgtacattttactacttttagttttgtattgttttaaatcaatatcctggaaactcagaagtaaaaaagagaaagaagaaaaatatatgtcatttcatgtaaatttatttaaaacacagacttttggcaaggcacagtggctcaagcctgtaatcccagcactttgggaggccgaggagggtggattgcctgaggtcaggtgttcaagaccagcctggccaacatggtgaaaccccatctctactaaaaattcaaaaattagccaggtacggtggcagatgcctgtaatcccagctactagggaggctggggaagaagaattgcttgaatccgggaggcagaggttgcagggagccaagatcgcgccactgcacaccagcctaaatgacagagtaagaccctatctcataaataaataaataaatataaataaaacacagacttttgtgttaaggggacctaaacatgactgtcagctgaactcagcaatcagacaagtaatttaatctctccaaagttcagatgtctcatttttgcaatttaagtacaataatgttgactttgcattatagttcatttatttaaacacattttaaaaacctcccagatgccagaagcctgctagactctgactatatagctacgcttttatgaatatctgaagatatgcatgtgtctaatgagcaaaacagatataatccctttcatagagtttactgtctgacaaagaaagaattaggatacatgcaacagtatgtaataaagtgcaaaatctagtactgtgtagctacttaaaacatattatatgctttcttcctttccttttccctgcctgatcttactgccataagaaatcttgtaactgtgattctgtcaaatgaatctaagaaggatgttgttgctgatggactagtatagaaaatagcagcatgacaaattaaatgtgtcattggggaagtgagattgtataatgaactgagtttcctggtcagtcctgctggaactgtgcctttcagcaaaatgagtttgatgatttcattccaaagatcaagttgcagcaattttcatcatgaatgttacccaatcatagaaaaattggcaacatttctcagcagatgttacagtctttctcaaaggaaggttctctcagctgacaagctaacgatagtgctcctgatggcgaggggagagacggtgatgatgactgattgataaaaagtattttagtcatatttccaggtttataaaatgatttgcaaacattttcttttgttccctctaacaccgctagtagataatggaaactcctttgatttggtctgtagataattttatgctatgttatatggaatatccacagcattttgtgaacttgaaaacaaaggaggaagcagcttgcatatgcatatcttgctagcagattggtagaatagagagagcagttagcatgtgaggaccattgaggtaaagtatcccagagttgtaactttttctgggccttgactttggctaattctctgcatgccaaatatcatgtagccatccagaaatctgtctgaatattgagatggtgatcatttctctcctgggtgttatgaagaaatgtgtttattaaatactttgcatcccttaaaggaactatatgaatgataggaataagaattattgacagttttgaatggtctattgatattactatggctttgtttctaccaaatatggtaagtataatgtagaggaaaatacaaaatacaacttttatcccccatttttttcattcaactatacctcaatattcagtgacagggccacctcaatctccgcccatgaaaacgcatctagaggagtgtcacaagtttttcacagtgacatttttgcttactgatacaagacagtgatggtgactgatgatgtcccagtgatttctgagtagcttctaaccagcacataactcccccaacagtctttaagtctttaggtgcccatattttcctctttgttctcccccttcagactgagagtttgtagagagagggcaacagatcttttcaatacacaactaatgcaaaatgtatcaggtttttcttggatttcagctactccctgttaaacaatcagagcttagtgaacagtgattcagtgaggagggaaagcactcaggaaggagcaggaacaagtacaagtttatgaaaaggattagctagcaaaacaaggtcaaactctgcaatagtttgttttcctctccctagtatccctcttcaatcagaaaagagactgttatcagttgctggtgttatgactgggcacatccgccctgggtcaaatatgctgcagtctgcaaagccagcagcagattgcagtcctctgcagtccagccaggccagcagaacttgtgtagccatgtgccctgttatagctgtaatactgaattgggaatgttcccttaatggggcacttgagggcaaaagcagtgaaagcttttcctttctcaaagcagactgttcttcccgtagtgttttaagaacacagacatgtattgggcaaggcaaagccaaaggtggcctttacaagattattaaatctggtcttccagggtatctaatctgtgtgaggaccctgatgaactaattttcttctaaagtgctatatatgtagatatcatcatagagttacacatgaaatggctcattcaatacttttttagatgcctggaaatatttaagggagtaactaatcaattagcagcattcctgggagaacattgtcttgtcattttaacagaaaactctctttgtgattttgcagccacgacagcccaaccctgactggcgttactctgcctccctgagagcaggcatgcacaggtatgtatttccctcctcattcactcagaagtaaccttaacttggtatggctcagataaactgcatctccataggccagaagcagctgtcaaaactaaaaagctttaggtactttgccaggaaaatgcaattattttgtccccatgtttattccttgaaagatcgcaaatggtcagtgccagatgcttatcaagtgctggcatataagagtcctctgtaaaatcacagaaacaggctgctatgtattttctcccatcaaaatttctacagggaagtaatttcaacctccttcatccctctctacctatgctttcttttcctcctttaaaaactgtaattaatactcatgctttgagacttgggtacattgtgcaatgtatacatacatgttgtctaccttgttttttttttaatctcacattggctattacatcctattaccctcaataattgattgctattgttgtttgtgttcacacctattagagcctcctcatctttcccatctgttgctatcttattgtcatcaatgacatggttcttcagaagatgagccatgtaaagggctccaaatctagcttactttaaattaacctagagtaacggtattagtctaagactcagattaaatataattttgctttctctactttgtctctctgacagtaattgattaactaccattatttctggaggtgatccagtatccatgccatggggccaaataaaagattcattatttgcgaatgtctttggaaaccaaatgggaaggaccaagaaacaaatgatcacaactatcaaaaggatttaattttaaagaagaaataatcttcaaacttaagcccctcaaaatatctgggcaactatcaagtgaatattcaccaaacttagatcagttcgtaaagagaaagcctacaaagtatgtgtagagttaatgtgaaattagttttagcccattaaaatgcattagattgaaataaattaacatactctcaagcattacaaatgagcagaaatcattacattgggtgctatttctgattcagaagcaatcagtgaagggctgaagattagtagttggcttggtaagatgtcacattggaacctgggtcataattttaggccagaaacattcatgcatataccagaatattaggtatcagaagaaattctttatatttattagagaccaacttgtgcttttgcctgcatctgagctgttggtggagacatgcaatgggtaaaagcatggtttacagtaccaactcttgaaaagtaccaaagctatgagttgtgccttaaaaactacatttgaaataaaacattaaaacataacttcctggactgggcgcggtggctcacacctgtaatcccagcactttgggaggccgaggtgggcagatcatgaggtcaagagatcgagaccatcctggacaacacggtgaaaccctgtctctactaaaaatacaaaaattagctgggcgtgatggcatgtgcctgtagttccagctactagggaggctgaggcaggagaatcgcttgaacccgggaggcggaagttgcagtgagccaagatcgagccactgcactccagcctggcgacagtgcgagactctgtctcagaagaataaataaatgaataaaataacataacttccttatcccattttcaaattgaaaaaaaaaagccaaatgtgctcctattcgggtttcaattaagatattatgagatttgagtagggtaagaaataaaataaaaattgaaattaaaatgccatttcttttttgcattgtaatacattgaacatattaaatgagttgtgaacctaaataatactaatctttttcgtatgtgtgcttgggtgttctcggtctttccagtcttggacatcatgtaactattctttaaaaaattctgctttgagctgagctggctccaggatagttacaccttcatgaatctgactgagcccacacaatttgctagtaggatccaggaacacttgaaggctgttaatatttggggaaaaaaaacagataattctagagtgtagacaaggggaagaatagtaaaaggtcagagtttaatgagtgaatttctactggatatgttgtttgaagtcaaagagtgagaaaacattgaacttatatgttgccttccctctaatagttcaagtttgcctgctctgttgcctcatataacccctttagtcagtagtctaaattttattttagaaatttaactttcaagataagcaaatgtctagtttaaaagggtcctctagtctaggtgtagtggctcatgcctgtaatcccagcactttgggagggtgaggcaggtggatcacttgaggtcaggagttcaagaccagcctggtcaatatggtgaaaacctgtctctactaaaaatacaaaaatgagccaggcatggtggcgggtgcctgtagtcccagctacttgggaggctgaggcaggagaattgcttgaacctgggaggcagaggttgcagtgagctgagatcgtgccactgtactccagcctgagtgacagagtgaggctttgtctcaaaaataaataaaataaaacaaaatgttcctctaattttgatgagggttttcttggacattttctcttaggatcccacttatttcttccttcctttcttccttcctcccttccatcattcattcattcattcattcattcatccaacaaatatttgagagattaatatgagttagtattagacatacataaatgaatactgcaccatgttctcttttcccttgaacagtttatgttctatctctgcttgcctctaaaggtctcccagtttgtatctcactcccagcaatgttttatgctgaattaatctcttctgagcggggatctgtgagtggtggtgatcaagtttctctagtctcaggaaatatagggtgggtcatctatgcataaaagatatagaaagagtaaaatagaaaataaggttaagaattaattagatagccaaattggaacaatactccaattatcagaaaatattttagtgtgttttcttctttagagtagagaacctaggaacaagagaacctgcaagagaggcttggaacttttgagaacaagccctcctcatctgcttcagtatcgagatgttaaaatggcttagtcctctgatgggcttcctgttagatttagtgagcgccacatggcgttaataaaaaacagaattgccataaagatagaacatgtgtgttcctggaatagtatagcaggcaataagtaagtcagcaatgcttctgcagtttatgcagggtgactgctcagcagtaattgcttcagttcaagcatgagcagaatgtgttagctgcagccctggcttcatagttgtaagcaatttctgagggtggaagaagagatgggaaagaatttatgatctaaccgttatctgggtctgtgtgtttattcagctctgtgcacctagaggaggctggcattctacgggctggtccaggagggcctgatcagcagtggccaacagtatccagtgcaacaccaggtaaagagctggggtctctccattctttcttggtttctggaaagtgatcagatgacctacttttgtaagatcaggaatgttgatggctctttttcttttatatttttgttattcccttttttccatacatacatgatttccttacatatatgattattttgattttatacctaatgctcttcaggagttgaaaaaggataacaaggaaagtgtgtgtgcacgcatgtgtgcatgtgtgtgtgtgtgtatgaagtttttggggtttgtttgtttgtttaaatcaggtacctttcaaatgcttaggtcatccaagccatgcagagaagatctggtggccttatgcacagagatgacactgttaacaaagatcttttggttgaagactatggaaacccacccaaagtagtaaggaaagaaagagaaaaagaaggaaagaaagaaaaaggaaggaaggaaggaagatggtttctcatggaagtggaaaattatcggaaccaaggcattgttttgagttcaagtcaaagtcaatctgcttctctctgcacatcaacaacattctgcagactgacttttagtgccttggcatgcatgttgccaaacatgaccgcctcacaatttcttagtttagagggataatagggactatttcctaatccaaactttcaggaaagagaacctgctaagttgtgtaaaaaacctaatggctgggtgagtataggaaaattgcttaaactcacatttgcttggtatccttattcttgccctatcactaaagcagggtcatgtaatagaaatatggctttggaggcccatcgctgtggcagttttcagaaagggaagattaagtgttggtagagaccacaaattgtgtctactctaatcctctattaatagaacatcatgatgataatagtagttactaattattaagccataatatgcctagacactgtgccaagtacattgtatgtgtggtctcatttattccttaagtcaagcttgcaagggatttattacatctattctacatatgagaaactggagaggcagagagattaagaaatgtacccaagttcacgtagcttgtaagtggcagagggtaggattcaaacccagatgtgtttagtttcaaatccaagtatatctagcacttatattcataacatggctggcttgcaataatccattcaaattcaaatacatatctacatacataacagatgacagaatgtgtgtgtaaaaggttttttcccaaaaataatcagatgcctttcaaattattaagtaacatgcagctaagggcccatttttactggcaactttaagggcattcgttgattctaatcagccaggatttgctatttatggatgttgcacaattcaactaaaagtcacatttgtccaaaaaatatacgagttgaagcaattcattagagagctaatattgccagattgcaaggggaaaaacataaaatagttcattgacaaatctgtaccctcagtgccaacgatggagtgaagaaatgatggaggaggaagtggttttagactgccaagtgttgcaggatgtggaggcatctgggaaggtgagaacttcccaaagaagccacgtgaaatcatgactttctaccttgcctttatttcagagtttttcttgctcttatggaggcattgtaggtcgacctggtaagccacaaactaactttgaatacattctccctcccattggtgatgctggttggtgtgtattcctaggcaaatgtggaataggaaccatgtattgatatttcatacatctggccaagtccctctttcagattcaaaaaatgttgagaacctatcttttttacagagatagagaaggggatctcccttgttccctttcttactgtcccagcccctcttgtataacccattttatccagaactgtgcctggctgctgatgcatgagtcacagtcttcatggactgtgctggatagagcttacatcttccaactactccatggcaacctaatcatacttttcaatacatacctctgcatcagtggtgtaaagttaaagggattctctgccttctccctgtccttctggtacttttaggtttttaggactcaatatatgttctgcactgcttggagggaatatggcataaagattaagattatgatttagagtcagatttgagttgaattctaatcccaagcttacttgctgggtgagcatagacaaactgcctgaattcatattttcttaattaccctttctgtaaattgggtgtagtaataataataacacctattttattgagttaccatgagaactaaaggagaaaaaaagaactgagcatagtgcttgacatatagttaataaatgtctaatcttttttttttgagacagagtctcgctctgtcccccaggctggagtccagtggcacgatatcggctcacagcaacctctgcctcctgggttcaagtgattctcctgcctcagcctcctgagtagctgagactacaggcgtgtgccaccaagcctggctaattttttgtgtttttagtaaagacggggtttcaccgtgttagccaggattgtctcaatctcctgacctcgtaatccgcctgcctcggtctcccaaagtgttgggattacaggcgtgagccaccgcgcctggcctaatcttcttactcttttttctttctggactacttttctgcaatctatgatatagtgttggctgatagcctggtggccagaattcagtagttctcatttgcaggcccagatatagaccctctgaggttatctgggtctatataatccagtcaccccaactgttcccctggaaatggagtgaggaggatttattagttgctgcctgaagaaaagggaaatgctccaaaaaatttggttgtttccagactcaaatagagcctgcctttcattgattctgttgcccttaaagcttcacggtgaagatgcagttgcttccaaaaggcttctttctggtgcctaagcctccttatacttgcttcagagccctttccgtgaaccagctgtgtattgctcttctcatcccaacacttgcaatggctgaataaaggaagtggggcctgccttacgctaatcctcgttcatatgtgtttcttaaagttatttttccttcactgatgaattccttttttttttttttttttttgagacagtctcgctctgtcgcccaggctggagtgcagtggcacgatctcagctcacaacaagctctgcctcccgggttcatgccactctcctgcctcagcctcctgagtagctgggactacaggcgcccgccaccactcccgtctaattttttgtatttttagtagagccggggtttcactgtgttagccaggatggtctcaatctcctgacctcgtgatccgcccacctcagcctcccaaagtgctgggattacaggcgtgagccactgcgcctggcctcactgatgaattcttttgctttttaaagaaactgttcatttattttcacagtctgcaaaagcctaagataaagatgccacactctgaaaggatcaacaagggcatcaccaagtaatgttttctgcaggataaacaagtcaggcattaaattggttaatcctgattactggcccctttctctagcctcccctctgtgtgagcagacccggaccacaggctttcttatttcctttcagcttcccttgagactgagcagagagagaaaattagctaaatcaggaatgcagggaatacagttgcagcctcttcttcagatggaggaatgcgttttggggggagggacattaaagggccagtcgctcatgttacagctctttttaacttcatgagtactaatgccctgaagaggttttaatgaatgccctcttgtgatcagttcctagggcaatcccaggttataaaaggactgcccctgcctgtgagggaactggcctggcttcagtgggccaggctgctttgttatctgttattggtttttccagctcctctttctacatttcaagggatctcaggccttacctaaggcaacagtacattagttttagagtgggagatgctcacagttttcagaagagttcagaaagtttcaaaacacacagcactgcagaagataacattatagcttctcaagaccccaggggatctgggactaaacagtgaaagattaattaggtagcggaagccactaaggcagtgagtcttagttagagaactttggtttagacaatggttctcaaaggggcagcaacaccaacaatacccggaaacttgttagaaatgcaaattcttaggccctatcctagactaatgaatcagaaattctcaggatggaggctgggtgtggtcgctcatgcctgtaattccagcactttgggaggccaaggcaggcagatcacttgaggtcatgagttcgagaccagcctggtcaacatggcgaaaccccatctctactaaagttacaaaaatgagctgggcgtggtggcaggtgcctgtaatcccagctactcgggaggctgaggcaggagaattgcttgaactcgggaggtggaggttgcagtgagctgagattgcaccactgcactccagcctgggtgacagagtgagactccatctcaaaaaaaaaaaaaataataaataaagaaagaaagacattctcaggaatgggacccggcagtctatgttttaacaagccttctatgtgataccaatgtactgtgaagttttaagaactggtctaaggtaaatattcctgaggttgtcttatatcattacagggtcagaatgcatgcaaggaagccatctgtttatggttcttgtgagaagcagggggcctttccccatgcccgagagataattgttaagagctcaagcttgggagtcagtgaccctttctgaattctacctctgccactcagtaattgtatgttcctgggaccattacttaactttcctgattctcagtttctttctctataaaatggggagaatagtggtgtctaccttatagggttcttggaagaattagatgagataatgcacacatattgcagaatctgaagaacaatcagggtttagtaaatagtagctatttttaaatgatttttccaggtatgagtctatcctacagcttcaaaatttagacccaggttgttctgagtattctctgtgggaagaatctgctatagagaagatttttttaaagtgcctgtctctttgtttccttaggggattgcttttgccctgatttgccacatctctttactctgtggaaaatggacagtttatgtgccctagttttatatggggatttatattcttaattgtctcaaggattcttacctgtctgacaaaaccaactccccatggaaagactccatggagactccatctctgatccttccccagaaagaaagcatgattcttaagttttttagaatctgtttaggagcactgtcaacatgaatttttctatttcatgagtgagtgcagcctcgggccttgttggagaatttagaaagcatgctgttccactaacctgttcaacctcaacttctgccgttgtcatagcaatgacagtcctgggaggtgtgtgcatatccttattaggaaaaaaaaatgagatcagggatctatgtgagtggggcagctcccgcctgtgagtatccttcgctgtcacctgccatctgacagcccaggagtgccagcttggcttggctttctctacccgaggaaagtaagtccttttaagatgcacttttactttctggggttgtgaaactcattgtgtttgccagagttctcttcgcagcttatgtaaagaatttgtttgttttggattgacctgaagggaggaagcaagggtgtgggaaggggaattagcatcccctacctaggagaagccatgaagcttacttaagtctctgctggctccatccattcatgactttcttcatcttcttcttgggaaaacactctgtaccttccacttttaatggtcatgtaaataaaagactagaatggagatgtcctggttttctgaaattaaacatttttgtttatgaatagactctaagataattctttccctagacgctctgtattttcttggacctctcatttgccccatagtaattattctaggattggtggcctgggcagaatacagtcatggttaagaccatgatacataatagaagaatttcttccgtaacagtagccccaaacagagatcacgtgtctcctgaaacctatccagtctcatgtgcactcagatgtacgatcctggatataacattttagagggtgtagtgaggagaatagaacaacactgttctcttaggctgcagtttccttcaagccccacgatggagagaagcaggctaatgcagggtaaggaaatagagacttattatagtttcttcagttatcattgattcctttaatatgccagctacattgaggcaatacagtctggcctctgaaaaccttgtcaggagaaacaacttttgaatatatcttagaaaaataagacactttatcccttcttttgtttaagagtgttgcataaaacaggagagtttctgaattaccctcccttctagctttctttatacaccattctttgtagctgaagttttaagccccttgtcaaaagggagattcaagtttctgctggggacatctcagtgtcacaaagggccaaggaagtagggtctcaccaactttgccacctgactcagctcaaaggtgataggtcacctgtgtgactgagagctttgtgggaaagatgatatggagggtggagagtctgcacttcactctgtgggaaaaattgctgaggttgtttagaattgttaggcttggaactcctcctgggaggtgcttgaacaagaaagacctgcttataacctgagttgagggcagaggaggaagatagtttgtaattcctttacgttttgtggctccggcaagccctgtcctcagcctcactgacacaagtaaactaaaaatgaaagtctgtcctagtgacagcaagggtctttcatggcaatattttaaaagaaactctgcccagatttcaaaggaacgtgaaaattttatcttcagaggcagtcagctttgcagttgaaaaggccattgcctaatctggagaaacatattcagttcaagcactggctagagactagaggcccccaggaaagggccataagattggtcactgccaggaagcctgtcaatgagtgtgtggactggagaggaatctttctctgcctcagcacttggagtctccgttattcacaatcagaaaaagagggagagcagagatagatgacattccacgtttttctcggtgagaccaagagcttcctcagcaacagccctgcctgaaattgtctatctccaagggcgtgggctaggcaaaggatgggagaagtcagtcctgaagatggtaatacttaaaggaaataagggggacaaaggatgcttgtgctactattgaaacaggaaattgagagctctgtagaagtcagactcaagaggcataataatagaaagttagggtatgaaaaggtgacttttaagaaccaaatgtggacccgaaagagaacaaagagaagtttattgtaactagcgttgtattccttgtctgctggataccaaacaatgtaccccgggtcttgagattatcgatgccattgtctgtaaaaaaccaaccaaacaaactttaaaaataagtaaagcctgccctgtacagaaaatctaataaagcaaatttgttggtgatgttccaagaaggttcaccagcttgggctttcaaccagcattgacccaatcttgtgtccagagctgttgctgtaggtggtatcatgtatcaagctgaatagtgaggtgacattccccaagtcttctctcttgtcttttttgactgtgcatcatagatactgtattacccaagaacacacacctgttcgatctcttttcctataatcacctggagtcagatgaataccgtaaaggtctgtggtaagactagaagcctcagccagtatgaatgatttacattagatgcacaccaagctgctttcggagagtccagatttatggggataagagcatcactaggtatatcaacagccctagggtggatacctttgagcctgtaaatttggctctgtgttggacgatgaaccatggaatacagaagaagctcccttctctcagctaaagcctattagcaaaaatagagccctgaggacattgtattttaagtgtatgttccagtgagtgggtcgttgctgggtcaagttttataagtctttaaatcccatactgttgcctcctggactgtagaaatagtctcttagaacaagagaaaggaagacaatagctaccatttattgagaactgtgataagcactttacatatgttgcatacttaactttgagagaagtacattattattcccatgtttcagataaaaaaattaaagctcataagaattaagtggctttcttacattcacacagctagtaaaaatgttttttgctcaccattgtattcccattgtcaagcaggatgcctagcacacaatgatgctcaataaattttgttaaattcattaataaatgcagtggtaaaggcagtatttgaactcatgtctgcttgctgctgaactctatacacttaacacattactattatcttgtcccgcatgatacatgaagggaatagcttggtaacttggaaaagactatttactgtctgagttctaggccaactgtagggtgtctgtatttatttcccattatgctataacaaattaaccataaacttcatggcttaaaacaacacaatgtattatcttacagttctggaagtcagaagtccacagtgagtttcactggctaaaatcaaggtgtgttcttgccactatataacaaggatccactttcctttagtttccaataacaggctccttatttctacctgagccctcactggcagcacctttaatgccatatttgtaataacaatctgttcatgacaatttaggtttgctcctcacttttttctgagtcctctctagtagagccattaatatgcatattgctactagcagcctgttcaaggtaatgtaggctctttctatcatgctcttcaaaattcttctagactctgcccatttcccaatctcaaggccacttccgcatttttaggcatttataacggcagaaccgcacttccagataccaaaatctgtattagtttcctagggctgccataacaaattaacacaaaatcccttttgccatgtaacataacatattcacaagttctaaaattagaatgcagtcattttggtggggccattattctgcctaccacccggtctttcatgttcaggcagaggtggctctgtgtgtgtgtgtgtgtgtgtgtgtgtgtgtgtgtgtaagttaatttcagtagagaatgagctagagtagagaaagagaattaaggtgagatgtgtcatggaagaacagtgactgatgatgctaactttgctcaatcaagaagtgtgatccatttaaatcatgctttcagtgatctatccaatcagataaactactctcccttcctgggaagagtaaggaaggaagtagagctaaagatgaaagttcttttcgtagcacatccctgcaaaggatgggagtattgttttggtgggcattcccttttctaagagcaaagatggaaatgtggagagaggagaaaaatggttcccattacattattgtgttctggacttagagatattgttctgccccaggtctaagaatattgttccaagagttgggagcaggcagcagaggacagtactctttagatcacccagaggccaatctgtaaggattcaatcctggggcatggtagctaatggaaaagtcactgtcacaagtgatgccaggagatggggcaacacatattgcctgccttgtatgcatctagcgtctgtgtctaagtgaaagcagattatatccagaacttccctggaaaatagaagaaagagcctgattggtgtgtatgtgtgtgttaggggttgaggggtgggtaatgttcctgccagtattcgtaaatcccacctgcttttcctgtgatgcttcctgtgttggggataggagggtgggatggttcagggtcaattttatggatccatatgtatctaaggatgtgtttgttttttgggaacattttgtataacaaccagtttcactctagctccctccttgatattctaaacaagctggatatctccaaagcttaggccctctccatacttacagcagctctgactggagattaaatcaccccttatactgctgacaatgattaggccatgggacccatgaaagagcctccccagagtccagcatcccctgtgggctccgtgtgtcatcaagatgtcaatccaactgctgttcctgcagtctgcaatcagcagggctatgtttattcagcggtcagtgtcacatcaatttccttctgttgcaacaagtataaatggattctaaatatttgcctttgggaaatttctttagagggaaactcactaaagctaatttttttagctttttggtatgttctctctgaatctggggatttagatatataaattagcttctttggtcttttcttgcccagggtcacaaccttgcctccaggataataccttctaagtgtttgtgatttgaagggcactacgaagatcctcacaaaaactacctcccagccgggtccctgaaactccatcattaaccaccttcatcagcatttctcttttaaaatccttattcattcctgttctccttctttctttctcacacacacacacacacacacacacacacacacacacacacacacacggggagagagagacagagagagagagagatagagaagtgaagtatatagtatcctttctagggatgcttttcttggcttggctccaatagagaattttgttgggaccctctatatatagtcgtgtaccaaataatgacactttggttaacaatggaccacatatgtgacagctgtcccataagattgtaataccatatttttactgtaccttttctatgtttagatacacaaatacttgccattatattacaattgcgcagtattttgtacagtaacatgctgtgcaggtttgtagcctaggagcaataggctataccatatagcctaggtatgtagtaggctatgccatctaggtttgtgtaagtacgctctatgatgtccatacaacaaaaatgcctagtgatgcatttctcagaacatatccccattgttaagtgatacatgactgtagtcatcatcaaacatttattaagcacttaggtcaggccaggctctgttctaggtgatgcagatataatattaaatataacacagtcctgcccttataaatctaatggtgaagggagaaatgtaaagaaatatgatggaaatattacattgtcatgtgataagggcgacaataatgccctacgtaggtagggtcaacgaaggggaaggaagctgggacaaaccaccagggcctgttggtccagaatgggacccagggtctgtctatgttataatcaattcaaaccctaggtaaataaggtaagctaggctgcctttcttgagacagtccccagattgttttcacagggcccaaacactctcagcaaccatgaacagtggatgttgtgggacctcagaagatggaattggaaattcaggggactaagtcagagattatttgacatttaatactggatattgaggccgggcgcagtggctcacacctgtgatcccagcactttgggaggctgaggcgggtggattgcctgaacccaggagtttgagaacagcctgggcaacatggcaaaaccccatctctacaaaaaaaatataaaaattagccgggtgtggtggcatgcacttgtagtctcagctacttgggaggctgaggcacgagagtcacttgaacctggaaggtggaggttgcagtgagctgagatcacactactgcactccagcctgggtgacagaatgagaccctgtctcaaaaaaaaatttaaaatactgggtattgcaggatggcaagtaggatgtggagaggaagagaattccaggcaaaggaaacaatgcgtgcatgcaaaaacaaaatacaaaaaactgaattgtgtagtctgggttaataagatgagtgcatttgatggatgtggtagaataaagagatgttaggaaatgagatcagaaatgtagactggaatcagattttgtaggaccttaaacatcctgctaaataatttgtagtttcatttgttggccatggagacccactagaaggttagttggtttgtttatatttaggaaagaagattcttttaagtttccttaactctactgaattttcaaaaatcaacctacagcaatccaaacttatctgtggagatacattccaagaccctcagtggatgcctgaaacctcatttagtactgacctttatatacattatgttctttcataggtgcacctatgataaagtttaatttataaattaggcacaatactcttgtgctttggggccagtattaagtaaaataagggtacttgaatacaagccctttgataccaaaacagccagtcggataccaagacactttctaagtgaactaacaggtgagtagtgtagacggcatggataggtcggacagagggatgattcacgtactgggcaggataaagcgggatggctcgagatttcatcacattactcagaacagcttgcaatttaaaacttatgaattgtttatttttgaaatttttcatttaatattttcagactaaggttgactgtgggtaactgaagcctcagaaatcaaacctcaaataaggggcgatcactgtactgaataatatgtcaagatgagctatgagcttttaacttagtgtttttcttctcccaaaccaaatattggaaactttggagtgtttagaaaaggagaatcgaaaagggaagtaaatgcagcattttttttaattgttaaataaagggctgggcttggaaatgttcttaggtaatcctggtggatttggtatatcatgtctgagaaaatgtggagagtgaagggcaggtttaaaatttgtctcatgttagtttctgaagggagatagcctggcattgcacagtgcctcacatttctatcgtatcacttaataattgtgcaacctgtgcttcagatttatcaatgtataaaagaggagagaccataggctgttgtaagtattaaatgacataatgcacgcaaaatgcttagaaccatgcttagttcatggtagccactcaaaaatgtcgtcagaactattactactcagtttaatgctcctagcacttaacacagtgcttggcacacagtaaagaggattcaagatgtttttgctagattacatggaatggtatggaagtgtgcagggtggtgtagagggttctcccattatcttgccttccttatactgcaatgtgctgacagcacctccattttataccctcaatgcaaggatatcactacttgtctagaaatggttgctcaaggctgagaagtgacagcaacacagagcctgggattgctgccaaatttcaagaagcacagattgtaacaaagtaaggggggagggtagagaagaaaagtttgaaaacccaaccaaagtcagaagccattttgttgtcggctgaaataatgcctcatagagtttcaggtggggcaggcagtgtgaaaactttgggaatagtcagtgtcaagttgtggtgctaagggaggaacccagtagtgctcaggcctgggcaagtctggcttcttggggcccagcatttagaaaggccctgtgtgttttgatattatgctgtcactatcttgaagttcttgataatttgttaacaagggccgcctccccccattttcatttggcaaatttcactggttcctgcaaattatgtagttaatcctgggtgcaggctagtttttgaaccatgttgggctagtattcttctgaacctctatctctttgatttaattacagaagaaacaaaagtcataacaaattatatctgtgcaggactaaaataaaatgagtagtgcctcactccctacatccaatcatgctttccaaaagtaaccactaccaataatttagcgtgcatcttcagaattctttatatgcctacattttaatgtatttttaaataaaatagaattacattgttgaagtaaatattaaaaaatatagcatttttgcatagaaatatttatttccctcaatcccactcccctttggtgaagcaaccactgttaacaattttgtgtgtatcctccaatatttttttgaaattaatgaactttactttttagagcagttttaggttcacaggaaagttgagtagaaagtgcagagttctcatgcactcctgctctcccacatacacaatgcccccacacccccgccacagtgacatcctgcccagagtggtacattcatgacaattgatgaaactatattgacatcattattgaaactatcattaccacccaacttccatgtttactttagggttcactcttccaaatatttcttgcatcacttaacaatggggatacactgagaaatgtgtctttaggcagttttttcgttgtacaaatatcatagaatgtacttacataaacctagatgatatagcatactacacacttaggctctatcgtatggcctatttctcctaggctacaaacctgtatatcatgttactatactgaatactgtaggcaatttttacacaatgataagtatttgtgtatctcaacatacctaaacgcagaaaaagtacaataaaaatacattattataatcttacaggacaactgtcatatgtgtggtccgttgttgactgaaacatgattatggggcgcatgactatatagagattttcaaaaagcaaaatgggataatgcaatatgtattattatacagcttgtgtgtgtgtgtgtgtgtgtgtgtgtgtatgttaacaaacacctttctacgtcagtacatatagatttgccacaatcttcttgagtaaggatatagcactatgttgtatacctatattataatttatccaatttgctgttggtatctatgttttctaaacaatacaatatacattcttatacatatttcttatgcatgcttgctagtatttatacaggataaatttcaagaagtagaattacagaatcataggatataaaaatatcaaattggcaaattggcattcacgtacctgtggttggactgcacttgttacatacttccctctgagccttccatccccacctcgagctagtgctatatgtcacttaactcagtgacatcatcatcaacagacttagcctctgcagttgaaaatgctagagcaaacagaggagaaaatttacttgtgaatcataatagctaacctgtactgaacagttaagccatgtgccaagtattattctaagcactttacaagtattaactcctttaatctgtataaccacacccagaaatttgtgcattattatactcattttactgctaagaaaactgacacccataggattaaatcagatcacacatttagtaagggcaccaggatctgaagcaggattgtttgacttctgagtctgtgctcttaaccactgcacacaccgtctctagaaagtttaatgccatctttatgccaaagtttatctacctggtttatcctttaacactattattgtatttattcatttacttgtcttttcctcccactgtgctgtaactctttgagaacagggtacttgtcctaatattattcatatttatatccctaattcctaatttaatgtctaatttattgtaaataagttttttttttttgagacagagttttgctcttgttgcccaggctggagtgcaatggcacaatctcagctcactgcaacctctgcctcctgggttcaagtgattctcctgcctcagcctcccaagtagctgggattacaagcttgcaccaccacgctaggctaattttgtatttttagaagagacacagtttcactatgttggtcaggctggtctggaacccctgacctcaggtgatctgcctgccttggcctcccaaagtgctggattactggtgtgagccacatgcctggccttgtaaataataagtttagttgaataaataacaatgcctccgggaggtagctattatatccattttacagatgaagaaactgtaagtcaatgttaatcaaatagtatcctagaaaatagtagaaagcagaatgctggagctgagatttgaacccaagacttttgatacttcgtccagtgtgctttccaccatgcctaagtagtctccttcacttcctccttcagagggctatggagagtaacctagcaaccatttctaagctggaaaatgtcacagccggaagtcttcagtcccctagaaggaaaagagcctgatggggagagggtccttggaaaagagaatttctggaagtactacatttgagaataggtggttaaagtgggagttggattagtaaaggaatactgcatagtagtaatacccattctttatttcagaatttcttcatgacagacattgatctgtgtgatttataagccttgtctctttttaatgttcacaatcccattagatggttattgttatctttgttttgcatatgaaagaatgggagctaagaggccaagtaccttgcctcttattcgttcaacgaataagtggtgaagcagattccaactcaagtctatgttacccaagaacctacattttaagcattttgttaccccctggatatgacagccaatgaagagggggtattttgagaagagactataaagggaaattgccttccctacatcctgggggaccttatcaaccaggaaacaaggtagagaaaactgtgcagcctgagccctgctgggttgcggggggctcacagaaagaagaaatgtgatttttttttagctaactacggagaccagccattccaatgtttgaatctgggttcgcagcacatgatgtctttatactcttaacctagaaatggcagagttattttgggcacaaagcaagagctgtggctttaaaaatatgccaagtgtatttatctcttccgctccaagattactgaaaattagcccagctgtagcttgggacaccaaacagccaaaaaatcttcttccagctcaactcattccacccaaagagggtgaaatacccaggagtagcagctctagcggcctctgggtagtggtattagattggcctccccattgctaagcctgacatccaatcacacacacaccactctcccagctgctctgtagatcacaatgctaggcctgtgaatggagctcaactccgtctcttccctcatccccaaggcttcacaagaagtaaacaaaacaaacaaaaactatttgattattgagccaaggagtcaatgtgagaatagtttttcaccttcattatcaaatgcctgtgtggagctgaatgtggtggctgacacctgtgatcctagcactttggggaggcagaggtgggaatattgcttgaggccaggagttcaagaccagcttgggcaacacagcaaggccctatctctctctctgtctctctctgtctctctctctctctctctctctctctctctctctatatatatatatatatatatatatatttttttttttttttttttttttgagacagagttttgctcttgttgcccaagctggagtgcaatggtaagatctcggctcactgcaacctccttctccagggttcaagtgattctcatgcctcaaactcccgagtagctgggattacaggtgcctgccaccatgcccagctaatttttgtatttttagtagagacagggtttcaccatgttgggcaggctggtctcgaactcctgacctcaggtgatccacctgcctctgcctcccaaagtgctgggattacaggcatgagccactgtgcctggcccctatctctgtatattaaaaaaaaaaaatcttagccaggcatagtggcgcacacctgtattcctagctactcagaaggctgaggtgggaggatcacttgagtccaggagatccagtctggcagtcagccatgacctcaccattgtactccaacctgggcaacagatatagacgctgtctctaaaaaaaaaaatcctgtgtgatttaggacaaattatcttgctgtaatttaagccttcatattccttttttataaaataaatatgctttaaatatgtatttagatatacacttataataatagctttaattaattgtaattaaatcatttaaaattaaatacatgcaaaataccccataaactgtctaatccataataagcaatcaatagtccttaaacaaatgaatcttctgttgctctgatcttaataagtaaaatttaacgagtttttactttgcaccatgcacttatgctatgtgctgtataaggatagttacatttaatctataaatcaaccctatggggcgggcactcttatgaactttttttacggatgaaaactgaggcccagagatatgaaataatttgccaaacatcaccataatttacatgatgtagccaggtttaagcctactattctgattacagagcctaagatcctacagagaacagggagtatatttttacattcccttgtttccatggaaaagtctttccactgtcaattgaaggactaagcagcagcggggaagtgctggaaatgctagcccaggtgggcttagctttctccctctctctctgatcctggacaggatttgggtttcagaccacgattctcctgtgttttgtgggctgtgattactcagattaggtttgcccaattcataaaggactggcgggggttgggggtgaaggtgtgggagaaggcggagcttgtccagtcggtccaacaaaccccacagatggcgaaatagggggcggggaaggagcttgagatattttacaacctgggctgtttcagtggttgatggcggatggtttttgccttttggtcagcctgagtatatactatcattctacaatcggccaaattctgacagagagggagacagagagagaggttgattaaattgatgcccaaaaccaagaaggagcaaagaaatcggggctgtttgaaaaagactgcagtggctgacttgggtggtgagcggaaataaggaggagggagaggcggggtgtctctgcgcggaaagcctggaagttcacttgcaaacacagaatctgcacagccttcggtgccctgactctttcctgggcatccagaggcagcagcagccgccagcgccaaagaacgagcagtccaggggctgggccggaaacggctataatcatttaatagcctttgccggctgcactgacttagcagagtgggcggtaggcaggctccagagtgctgtctggcaagatagtccccggctttaatcaaaatgatgggttttctggaagctctttattaacctcagcactgaaatcccagagctggtaacaaagggatgaatggggagcaaaggggcggggccgaaacctggaggccgggctgcatccgcaccccttcccccacctccactcctttcaactcattctggcttagggctcctgctggcatctctgtgcctcccaaatagtagtaacaaaacaggcaataaccataataattggcacatttgtataacgctttagcattttcaaaggatgaccttgttatacagctcaggatctgagtctcctagctggagtcagactccctagatttgagtcccaggatccaccagttagtgaccatgtgaccattagtccttagtcccctcatctataaaacagacacataacacagacagagatactagaaatgtctacttcatagggctcttgtcaggaccaaaacctatacgacgtgcagatttgtttaactctgttgcacacacataggaagggcacagtaaatgttaactacatcgacaaccctgtgatgtagacaggaaggggatcatctccattttatggatgaggaaactgaggctcagagatatttatgtaaatggcccaggactatgcactagtgagagaaccagggcaagtcctcaagaacagaaagagaacaaagcaagatgaagagaagatcagaaaagtgaacaccctccaacaccctccagcacatgcccctctgagagctttcctgaaaatagtatccttggtcaaaatgagtttatgttctattagggaaagtcagtgtaaatcagaaaagccctcctggccttaacagaacagttccaaatgcagatgagggtgagtttaacaggcctggcatttgcttcacaatcttctggccctttcctggcatttgccttggcaaagactctgacctgatcaatcctagtccctgaggctcaactccatcaactcaggcagccagggttagtttagcatgaaagaggaaagctggaaattttgccaaaaagattcctgggcagtgcctaagggaagtgcccaaattggattataggattacatgaagtggccagctacttccagagggcagggttttttgtttgtttgctctgtcacccaggctggagtgcagtggtgcaatctcagctcactgaaacctccgcctcccgggttcgagtgattcttatgcctcagcctcccaagtagatgaaattacaggcgtgcaccaccacagtctcgctaatttttatagttttagtagagatggggtttcaccatgttccctaggctggtcttgaactcctggcttcaagtgatccacctgcctcagactcccaaagtgctgggattttagatgtgagccaccattcccggccccagagggcagtttttaaagtagaagtgaagatctgtatgcatttattaaaatatatgttgttctgattttaaaatatatccctaccaattgtgaagatatcggctaatccaataaaaaagcaaaaccatattttgtataattatggtcgtattctgttaaataaacttttaaatcctattgggttgtaatctgtagtctgggaagggctctgcctaacgattcagacccctaccagatttatatgtgtctgaaatcctccttctagcctcttaacaggcccattcatttgggtcttgactgcatcctcagtcttgtctttgcctgagggtgagctaggaccctgggagcataagggaggggacttgccggagatcctagaagggaaaggaggcagcactgaaagaagaaacatttccttgattgatcatttgctgatactggcccctggttggggttaggggtagaaatgtgcttcttccgttttcatcttcttcaaaagggagtatctccatgattctgccccaaaggcatgacattttataggcaaagccagccaagtgtcttgagtgctcttaaccaaaaggaattcagattaggaggtcagtcagtgtttgtcagatccttaagcttttgttttactggaatgagtcacagtctacatgctgctgagctctcagagatgtttgttttatacaacaaccagaacaggtgaggcacagtggtctgtgagggactggagagaccacaccttgttctgctctgcggaagctggacatgtggaggaggcacctgactagatctctgcctcctggagtttaggctgagtcatatagaaccaggaagctcagtgacatgttaaagtggattaactcttggcagtcctgctgtgaggggctccctctgccaatacacacagccattaatgtcctttaactgtgcaagatgaacatatctctgtgttctgcatctccagatgacagtgcttaggcctcatgcagagtcctggttatggttgaagaaaaatttccattttgggctctgagggcaactaaaggactgtggagtggtgctgaaacccagttttaggtgccgaatcagaggtttttaaatacatttctctcttttgtctcagtctcttagagacaggacctgtattttaaaggtaaacaggcagattctggctgagctcaattgcagatttgattaacttagatagatcaaagtcattagtctcagagaaaaaatttgtttctcatccctaaagtgctattgtgtcagctctgccagggtgtaaggaaaagggtttggaagagagaagaaaatttcttaccctctctcgtcactgcctgctgtaaatttgcagtatcattatcttggtctcctaagccctgagagctgcattatatataattgcccatatgtgataccatttactgaattcttgcattgtgctaaggatcaagcttagtactttacatgcattacatcattgtctttagggaccccaaaagtgcctcattggagagttgtttggtctgctaaagagtgggtaccactttcacttctcacatcagtcctttcattcattcatccagcaagtatttactaaacacctgttatgggccaggaattgtgctaggcactggtgatacattggtgaataaacagatacattttttgcctttgtgaatcttacagtggtagagaataataggccaagggggtgctgcttggctaggaatgtcatagaatgcctttccaaggaggttacatttaatacagacttgaagagtgaggagtcatgctaagaatggatgagaggctcacgcctgtaatcccagcactttgggaggccgagacgggcggatcatgaggtcaggagatcgagaccatcctggctaacacggtgaaaccccgtctctactaaaaatacaaaaattagccgggcatggtggcgcgtgcctgtagtcccagctacacaggaggctgaggcaggagaatggcgtgaacccgggaggcggagcttgcagtgagtcgagatcgcgccactgcactccagcctgggcgacagagcgaaactccgtctcaaaaaaaaaaaaaaaaaaaaaaaaaaaaaagaatggatgagaaatcattcaagacaaaagcaaaccagatgtgtaaagatcctgaggcaaaaacaactccaaggagccaggtatggtggcctgtagtcccagccacttgggaggctgagacaggagggtcgattgagtccaggagtttgaggttacatcaagcaatgattgcaccactgcacttcagcctggttgacagagtgagaacctatctctaacaaacaacaataaaaaaacaattccaaagagtgtttgaggatctgaaagaaggcctgtatggttggagtataatagtaagagggagatttgtagatgagagtggagaagaaataaaaatcagattattgaagggacttatgtatcatggtaaggagttttttttttttttctcaaggcagtagaaagcttaagcagaggagtgatataatctgatttatatttttaaaagagtttgctatatgtatgttatgcctcatttttttttaaattttttatttttagatggagtcttgctctgttgcccaggctggactgcagtggcacgatctcagctcactgcaagctccacttcccgggttcatgccattctcctgcctcagcctcctgagtagctgggactataggcgcccaccaccacgcccggctaagttttttctattttttagtagagacgcggtttcactgtgttagccaggatggtctcaatctcctgacctcgagatctgcctgtctcggcctcccaaagtgctgggattacatgtgtgagccaccgcgcctggctgttatacatcagtttttaaagagagacattaagaaataaagatgactctggctactgtgtggagggttggagagaagcaaaagtggaagcagactgaataaggagactattgctgcaattcatataagagatgatggtgtcctgaaagagtggtggcagtgaaaattgggagaagaggacagagtcaagatatatttaggaggcagaaatgacaggtcttgatgatgtattataaatggagaatgaagaatagaatagagaaaaatgaataattagctttgaactttctggcttgagaaatggggtaaatggggtgtaatttactgaaactggaaagatttagaaaggaatagattcgaggaatcaagagtttgatttcagatttcttcagtttgggatgcccatgagatttccaactggggataccagataggcagttatacatgagattggagcacagagagatgtgggcttaaaatataagtctgcatctcatcagcttattcatatggtatttatatctatggatatggctgagatcccaaaaggagagagtgaagagaaaatagagaagagagtctagggccaaacccaaggaagcttcaacacacagatgaggagactgacaaaggaaactgtcaaagaacagtcagagagaaaggtcaggagaatgttttgatggtgggggccagaatatgctgtcccaaaataagaaggattgttgagctgaaggcaagttaaaagaagcagatacaggctgggtgcagtgggctcatgcctgtaatcttagcattttgggaggctaaagtggacagattgcctgagctcaggagttcgagaccagcctgggcaacatgatggaacaccatctctactaaaatacaaaaaaaaaaaaaaaaaaaaaaattagccaggcatggtggcatgtgcctgtagtcccagctactcaggaggctgaggcacgagaattacttggacctaggaggcagagactgcagtgagctgatatctcgccactgcactccagcttgggcaacagagcaaggctctatctcaaatttaaaaaataataatcatgataataataaaagaagcagatataggagaggtcttctgccctccctgtatttgcctaaaaaaccataaatttacaaagacaaaagttatcctacttccacctccctcctctgcctcccaccaccagggagaacaaaggttaaccactgaagataactttggactcttattggcctggaaatggtactgctttacaaattagcctttatctgccattcatttgccttcccccaagtagctacccattagagactcaaagtccttaaaggtcttttcctttgtcttacacttctttaaaaatttattgttctttgttgaagatgctatataagctggaattctaagccacctttttgagaactgctcattctctgggtgtctgtcatgtatatatgaaatgtacatgttaataaacttctgtttccttttttttcttgttaatctgccttttgtaacaggggtccagtccatctaagaacttattggggttattctacatgacaaagaactcatgagaataagtgtttcaagaaggggatgacaaatgctgctgagaggtttgataagatgaggactaaaatgtgaccattgattgtggaagtaatataatgaacttgacatgagttatgttagaaaattactgctcagggacaccaaattagaggagactgagaagtaataggaaattgaaatagcagttgtacccaaccctaaactgtaattgaacataaacagtttatttgatggagcttttcacgtgtcaaccaaaggagcagtgttagatacataaacattgctatgatgtcagagttccaatgtcatggccactgggatcactttgcccagacagaccattacccttcctctccagctctgacttctactcttctagaagtcactggtatactttatggtgtgtcttccaatcagactcttgggaatgtcttttattgaaaactcctgtggatgcataatcattttcccaagactcagggcagatttcacctcctctggaaccccattaactttctcaagtataattaacaatttcttcttctggagtcccacaatactttacatatactttagttattgcatgtattaagttggtttctagttgcttgagtgtatgtccaactagactgtgagcacactgagggaaggaatttggcttggaaagtaaaattggctcccagtgttttatctaaacaaataggctcaatttacaacaggattccatcctcttacgctgtgtattcccatctcttccatgctgcatcccaccacccttcaatgttattacaataaaattaagatcaaataatttattcagctaatttttcttgttttggacaaaatagacatcctaatacatttatagccaaagtttaatctagacactaaaaggagcatattttgcctttaggctctgtatttcccatcccgttcccagtcaagataatcacaactgtattctttaggaaattcttcacaaagaaccaaacatatgttactatgaaactagattcttggtatcctggtgaaaaaacctgccctcttgcttgtctgtaaatactggccttggctgggtgtggtagctcatgtctatgattccaacactttgggaggccaaggtgggaggatctcttgagcttcagtgtttgagaccagcctgggcaacatagtgagatcccatttctataaaattttttttaaaaagctagcctggcatgggagcttgtgcctgtagttccagctacttgggaggctaagatgggaggattgattgagcacaggaggtcgaggctgcagtgactgcatttcagcctgggtgacagagggaaatcctgtctcaaaaaaattaaacaaataaataaataagtaaacacttgccttgccctcagacttgaacaaacaactcgtgatttttctggggaggttcagcctgcctatgcagtactcctgtactctaccagcagtgtggcatcaagagcatgtgttgaccctgttaatgatttgtaatgttttgtctttcagaaccagaggcaggagaagtgtcccctccagtcggtgcgggtgtcaacagcaacagctggacctttaaatacggaccaggcaaccccaaacaatccggtcccggtgagttgcccgacaaattcattatcccaggatctcctgcaatcatctccatccggcaggagcctactaacagccaaattgacaaaagtgacttcataaccttcggcaaaaaggaggagaccaagaaaaagaagaaaaagaagaagggtaacaagacccaggagaaaaaagagaaagggaacagcacgactgacaacagtgaccagtgaggtcctcaaatggaaacaagccacttagccagtttttgtaataatggcaaatctctcccatgtagcaattccctgctcctttttcctatctacatgagccctcttagagacctcagaaatctgcagaaagttccctgtgtctgtctagaacgcatttaacaggttttgtcgtaaaagctttactaagtctggtgttaactctttctctccactctggcttgttttcagaacctaaaaagcagacccaagtttcctttctcctccgccgcaaaggagaggcttcccagccccgccagtgagaggttggactctctgccctgtgctccggggatcctgtcttgatgacacttgcagggcaggctgaaaagttttgagattgagcagcttgggagtttgtggccactgggtatgtgtggctaccgcgggtatgcgagtgccagatattggctgagacgagccagcttagactaattggtacaaggaaggcaagaaaacaaagacaaataaacagcggaagttatcagtatggaggggaagtgtaaacttaaagggaccagactttctaaatcttacaactcaagaggtggcagccaccctctaggagacaaaactacccccactgacaaggctttaggagaccctaaagtctgttggctgtgacgtcattatacctaaaatctgcatcatacctgcaagccaacagttcagtgttttaacagagaaccaccctgggaaacagaagcagatctgatgtgtttcctatacatgtcctgtgctcactttattaaaaattcttttgcacacaatgtttatgaaaaggccagatccttttccaatacttatgcaaaagcaaaagaaaaccccgacacctcacctttcgctgtttgttgtttcatagatttatttaaaaaaagagaaagtctatagctataaatctttaaagagaaatatgaatacaattcccctaaactctcctcaaaagagaattcagtctacagccatttaaatgatcattgctgctacagaagtgctttaagagaattgcctgaaacatctgtattatatcggccacctgccaatcacagctttactctttcaggtcactctggggctgcctcttgcatgtattactaaataaaatgatctctctttctctctctctctctcttttctaagaaacaattatgtgcactttgatacacaaccttctctaaccaactatatatcaagacccaaaaattgaagaaaaatattgttttctcatacagtgagcagatttttcaatctactaattctgtgacttgtcttggtgtgctagcctacaccttctctttggtttagttttccttttctataacactctgaattgctaatcttactaacacctatgatgttacctgaaatcaatctcccatatgtatgctgtatgctatgctaagactcctgaaatatacttactctgtgcttgtgtatgtgaatgttaatgcaactattacctagagtgaactttaagctttattgttgaatgtaattccattatatttccttttgtacacctgtgaaaaagtggagtagtgtttttttaaccattgttaatcagcttttgtgtatgaaagacacagtaaaatttctttcttaaatcaagatactggtgattcaaggaattttatttatggtccagccaagagccatctcgtgccaagacttctgctggcaagggaatggataaagctgttttgttctagtaacaattttggaatgaatactgacaatattccatgagggtgtgcaagcacaaattttaccaatctgacctctttgaagttgcagaatgctttgaaattctaatggtatctgaaatatcagctcatagaaagtaacaaaatttgctgtcaccttaaataagacattttaattttgttataatgtacaatttagaagtttgattaattatattatctatttaggcattaatataaaagaggtaggagtctgttatttaaaaaaagcattaaatttaaaaaaaaactgtcttgtctacttttagcttcattctcccatattttgaagggtgtgtaacttcagctctgcaggattgcatggggtaaaacttgttaccaacacatgtgaaccattgctacattgtaggttgtgatcattttgccccactgaagcccatgtatctgaccttacgtgccttttgaactaggagaatcgggctaatttattaatgatgataattataatgtatctgtacagcactttttacatttgcgaagtgctttccaatccatgttagttactagttattacagctgtaaggataaaacacgtcatgtggattcattttgaattggtgctattggtatttcctctgttattgctaataaatgaaaatggtggtatgaaagaaatggtggtcatttctaagaataggaggaaatagaacactgataagcaattaatactgaagaagattgctgcagtatgaaactcactgtaacactctcttatcacgttagcttttatgtccattactaaggcaaaagccccagtggaatcaagattcaaacttcatatcattagaatgggcagccaggaggttgctgcgtcactttgtagttacactatttcagttttctctaataagaattgcaacaaacccatttttatcacaagagcccttctaggcatctttttcattacttgtttagcccttgcacctctctacaattggaaagccaagtgacaccccaaagaaatgaacttttaggtcagggatagtggctcttgcctgtaatctcagaactttggaaggccaaggccagaggatggcttgaggccaggagttcaagatcagcctgggcagcatagcgagatcccatctgtacaaaaagaaataacttttattgagtacagggtgtatgccagccacactactgcataggttcagctgtgacaaatagattgttttgtccttttgtagttaaatttgtataaatataagctttagatgctgtaggttctcagttaggagcaattttgccctcctggggacatttggcaacgtctgaagtcattgttgcttttcattacttgaagtggagggtgctattggcatctactgggtagggggcaacgatgctgtgaaacacctggcaatgcacaggacagccccctataacaaaggatcttacagcccaacatgtcaatgtctcaaatcaagattgagaaaccttgagatagagtgaccatataatttgtgtagtccacttttgaaatggaacaggagacaccattcgttattacttcaggattcaagatgtaaactgggactgtcccaggctaactgggatttatagggactctataaataaactggtatagctgtgccactaactagatggggaatttgaggcaaaccactacttctctcagtttttcagtcatctctaaactggtcataattataatacagaccttatagatttgtgaggtaatcttaaaaggttttagcaggtctggcacaccatagtactcaataaatattattatttattaatccttttcttccatttccttacccccttttcagagatttagctattagacccagggaacttttcctactgactaaaatgtgaatgagggatggccaaaaaaatcaacatagtcttggcaataaaaatattttatttactcctccgctcttttgctcaccccaggaggaaaagaaataaagtcagtttcataactccttacctatttctatcataataataatcaaatccctaagtagtcaagtggccagtctgtttgcagctatttcacctcaattattggtgatctgaaagccagaaaccaaagggtttgaagtacaacagcttgagagagaaagagaagagtc

SEQ ID NO: 438 - DNA, 208257 bp, Homo sapiens
  source 1..208257: mol_type = genomic DNA
gtctttatatattaaatttctttatgtaagaaaatgtattgtggtttatttattgggaagtcttcattccccattaatacccaggatgattcaaagatcatgattaccaagaattagaataaaaattaagctaaaacccaagttttcaacattgaacttgaaatacatcttaattggggaaatgtctagagactttttttgtatctttagaaaatcatagaggctattgaaacaccacattttcccaactagatatgcgatcaccttaaattaatgcattttattaggcaatggaaggaagcaaacattttctgcagggtaaatatttaggaaatattaggtaagtccctctgagctattaaacaattaagatacaactattccctttaaaatatatattccaaaaaaggacacacatactcaaatgcttataagagataaattaatgtaataaatggcccacgcgattccaccctggtgctgcagtttgtaaaagaagaaaaaatacctgttcaattggtttgatcatgacattcttcatgggtcagggaagttttaagtggttataaaatggggtaaattggctttagaagagtttagaaatgatgtggattacttatagacaggacaaaatgaacatgcttgtttattaaaaaaagctattggaagcaggaaatattcagtttggctaaaatatataagcactataggagaaaatagaagcttaggcacattacatactggagaacaagcaagtacttataaactgtaagagtcaaaatgagaataccagcgtttctcatgggagcaaatgagttccaatgaataaaattatttggaatgcttttccatgcaagctatttgctataacttcctgcttccttgcactttcagccctgacatgactcaaggaagacatctaattaaatgctgatggtctttgatccttttataaaacatctgcaaatttccctgtcaatagcttgttcttggcaccagaagttccctagagaccagtcccctcaagtcaacaacaccagaaatactagggtgaagagggtgttatcattaataaaaaaaaaccctggaattcttgggaacacaggaatctgtaatgaatttttctaatcaacagtttacagttacatgtttacaaagtgtatagttaggtctctgtaatacttaaaacctgtgttgaaaaaattatttctactgaagtaaaagttgcccctatggcgaaactaaggaccacactcaatcaatcagtggtacaatgtgtaccacagtagtacaaaatgtattcctattctccgaaacgactgaaataataaataaaaccaagtagtttacagtagagtgtgtgggggtttccacaattgctacttacggtttggagccacatgatgtcgctctttaccacaaaatacatgagagaaggaggaagaagggaaaattccttctattcttactggaaggaaccatatacactctttggagtctgaaatatggaggatgcagctgcacttgactgaccgattaaaagatttcccttgactttgagaaacgatatttaatcagaacaaaatactgtgcactaaagatggagttttcctggggaagcggccaggaatcccggcgtctgctgctcttacttcttctcctcgcagcctgggaggcagggaacggtcagctccactactcggtctccgaggaggccaaacacggcaccttcgtgggccgcatcgcgcaggacctgggactggagctggcggagctggtgccgcgcctgttccgggtggcgtccaagggccgcggaggccttctggaggtaaatctgcagaatggcattttgtttgtgaattctcggatcgaccgggaggagctgtgccggcggagcgcggagtgcagcatccacctggaggtgatcgtagacaggccgctgcaggttttccatgtggacgtggaggtgagggacattaacgataacccgccggtgttcccagcaacacaaaagaacctgtccatcgcggaatccaggccgcttgactctcggtttccactagagggcgcctcggatgcagatatcggggagaacgccctgctcacttacagactgagcccaaatgaatacttttctctggaaaaaccacctgatgacgagctggtaaaaggtcttgggcttatattacggaaatctttagacagagaagaagctccggagatttttttagtgctcacagccactgatggaggcaaacccgagttgactggcaccgttcagttactcatcacagtactggatgccaatgacaatgccccagcttttgacagaaccatttataaggtgagattactagaaaatgttcctaatggaacattggtaattaaacttaacgcctcagatttagacgaaggattgaatggggacattgtttattcattctcaaatgatatttcgccaaatgtgaaatccaagtttcacatagatccaattactggacaaattattgtaaagggatatattgactttgaagaaagcaaatcctatgaaattattgtagagggcattgataagggacagctcccactttctggccattgtagagttattgtggaagtagaagacaacaacgataatgtcccagatttggaattcaagtctttatcacttccaattagagaggacgctccactgggtacagtcatcgccctgatcagcgtgtccgacaaagacatgggtgtcaatgggctggtcacctgctccttgacgtcccacgtccccttcaagctggtgtccaccttcaagaattactactcgttggtgctggacagtgccctggaccgcgagagcgtgtcagcctatgagctggtggtgaccgcgcgagacgggggctcgccttcgctgtgggccacggccagtgtttctgtggaggtggctgatgtgaacgacaacgctccggcgttcgcgcagcccgagtacacagtgttcgtgaaggagaacaacccgccgggctgccacatcttcactgtgtctgcgtgggacgcggacgcgcaggagaacgcgctggtgtcctactcgctggtagagcggcgggtaggggagcgcgcgctgtcgagctacgtttcggtgcatgcggagagcggcaaggtgtacgcgctgcagccgctggaccacgaggagctagagctgctgcagtttcaggtgaccgctcgcgatgccggcgtgccacctctgggcagcaacgtgacgctgcaggtgttcgtgctggacgaaaacgacaacgcgccagcactgctagcgcctcgggcgggtggcactggtggcgcagtgagcgagctggtgccatggtcggtgggtgtgggccacgtggtggcaaaggtgcgcgcggtggatgctgactcgggctacaacgcgtggctttcgtacgagctgcagccggggactggtggcgcgcgcatcccgttccgcgtggggctgtacactggcgagatcagcacaacgcgtgccctggacgaaacggacgctccgcgccaccgcctactggtactggtgaaggaccacggcgagcccgcgctgacggccacggccactgtgctggtgtcacttgtggagagtggacaggcgccaaaggcctcctcacgggcgttggtgggcgctgtgggtcccgatgctgcgctggtggatgtcaacgtatacctgatcattgccatctgcgcggtgtccagccttttggtgctcacgctgctgctgtacaccgcgctgcggtgctctgcgctgcccaccgagggcgcgtgcgctccgggcaagcccacgctggtgtgctccagtgcggtggggagctggtcatactcgcagcagaggaggccgagggtgtgctctggtgagggcccacccaagaccgacctcatggccttcagccccagtttacctgactctagggacagagaagatcagctgcagacaactgaggaatcctttgcaaaggttagtgtataacatccttttgtttaattttcgtattgtttttctctatcaacttcttcgtaaatttatttctaagagtcaaatttccctgggttaaaattttacctctttttacatatccattttaactaaagtcttttggaattataggacatcagagcaatatatattgccttccttcattttatgctgcattattcaatgcatattaacagaactgtaatttctagtaaattttcactatattcaccctctttgtttttggtaataatcaacattttagaaaacattttactattatttaacctattacatataaacaaatgtgcacaggctgaaataataaagctccataaattgtatgaaagtgaaaagctccgttgcctccatcgctgaagcccctcgcatgcacctgccaaatcacttcccttatttttcctccagtgtaaccgcacatttgccttttataactgtttgttcggggcctgttttgggaacgttatctaattggacttgcacaacatgtattgtctgtgcatttgtgtgttatttgtatttatcactcattgtttatgaaattatccatgttgttatatgtagttgtagtttatttatttctgtttctagtactatttcataaatatactataccttatttattctactgttcaggaatttgcattgtgcctcaatgtctatttcaaataatgccatcataaatatattgtacatttctttgatgcccatgtacacagatttctctcaggtttttgcctaagagttgtgtttgtgggtcacagaatatgtgtgtatctttgtcttttgtagctaacaccaaccaattttccaagatgtttttacctgtttacattcctagtagtgcataaggctttctgctgggccacatcatctctacatttgtcaggttattttcatgttagccattttactgggtgacttttgtaatctcattttgaaattattttatatttaaatgaagttgagtacctttctattttattttggcaatttttataccttattttgtgcaatagctgctcaaatctcctatttctctagtctgttgtttttcttttcttttttctcttctttttgcttccatagaactttatttatttccttatcttgtttttcttattacttaaacaaatcttgtattctgaacataactcctttttttagtagttttcaacctcatggctagtttttaattcttttttgtcttttggtgaatagaaagtcataattttgattaaactcaatttatcaatttttgcttctgatcctatttcacaaagataattttctgtggtatcttttatttcattgtttacattacatctacaatccatttggaatatacatatttttatcattgttgtgaggtaggggtcaagatttatttttattccttcttattatttttattatactttaagttctaggatacatgtgcacaacgtgcaggtttgttacataggtatacatgtgtgccatgttcgtttgctgcacccatcaactcatcatttacattaggtatttctcctaatgctatccctcccccagtcccccacacctcaacaggccccagtgtgtgatgttccccaccctgtgtccaagtgctctcgttgttcaattcccacctatgagtgagaacatgcagtgtttggttttctgtgcttgtgatagtttgctcagaatgacggtttccagcttcatccatgtctctacaaaggacatgaactcacccttttttacggctgcatagtcttccatggtgtatatgtgtcacattttcttaatccggtctatcattgatggacatttgggttggttccaagtctttgctattgtgaatagtgtcgcaataaacatacatgtgcatgtgtctttatagtagcatgatttataatcctttagatatatacccagtaatgggtcaaatggtatttctagttccagatccttgaggaatcgccacactgtcttccacaatggttgaactagtttacactcccaccaacggtgtaaaagcgttactatttctccacatcctctccagcatgtgttgtttcctgactttttaatgattgccattctaactggtgtgagatggtatctcattgtggttttgatttgcatttctctgatgaccagtgatgatgggcattttttcatgtgtctgttggctgcataaatgtcttcttttgagaagtgtctgttcatatcctttgcccactttttgatagggttttttgtttttttcttgtaaatgtgtttaggttctttgtagattctggatattagccctttgtcagatgggtagattgcaaaaattttctcccattctgtaggttgcctgttcactctgattgtagtttcttttgaagatttattttttactaccatttttttgttggacttttaaaatgagtttggaagtgttccctctccttcaattttttttttttggaagagtttgaaaacaattatcattgattcttctttaaaagtttggtagaattctccaggaaagatatctggttttgggcttttgttgttgttgttgttaggaggtttggattactgattcaatctccttactagttacagctttgtttagattttttatgattatgtcttggtagtttgtatgtttctaggaattaatcaatttcttctaggttattgaattttttggtatatgattttaaaagcctcttataattgtggcatcaggtgtaatgccacctcttttgtttctgacttccagtctttttgtttttttcttagtctagctaaggggcttgtcagttttgttgttttttcaaaaaatcaactaagtttaaaaacttaatttaaactttttttcatttatttttgctctaatctttattatagtatttcctccctttgctttgggcttcctcatttgtcctttttttctagttccttgagttgttaagttttttatttgagatctttcttctttcttcatttttagtgtaggcatttacaactcccttctttgtttttgttttcatgtttaagagacaagatctcactatgatgtacagaggcacgatcatagctccctgcaagtgatccttgtgccttggattcccaaagcactgggattacaggcgtgagccactgagcttgcccagcttaatattccttcttagtactgcttttgttgtatcctgtaagtttttattgtgttgtgttttcatttttgtttatcttaacatattttctaattcatcttttgatttcccctttcattcaaatgaaattttgaacagaatttcgttcaaaattctgttgtttaatttctacatatttgcagattttccagttttaattccagtattgatttctagttttattccactgtggtcagaaaagatatttagtaggatttcaaccttcttgaatttgttaagacttgttttgtgacctgacgtgtgatttatcctggaaaatgctctgagtgtgcttgagaagactgtatatttgctgctgttgggtggaattttctgtatatgtctgttagttccatttcagctatagtgttgttcaagtcctctgcttccttgctgattttctgtctgaatgttctattccttattgaaagtaggataccaaaatctcctactacagtcattggagatacattctgagaattgtatcattctgagatttcatcactgtgcaaacatgagagtgtacttacatatttacacaaacctagatagtatagcctactacagacctaggttacatgatctattgcttctaggctacaaacctgtacatatgttaactgtactgaatactatagggaattgtaacacaatggtaagtatttgtatacctaaatatatctaaacatctaaaaggtacagtaaaaacattgtacagatttttaaaatggtacacctgaatagggtacttaccctatgaatggagactgcggggctggaaatttatctgcatgagtcaatgagtgaatggtgagtgaatgtgaaggcccaggacattactgtgcactaatgtagactttaaagcactatacatttaggctacactcaatttatcaaaaaattttctttttacaggctggtcatggtggctcatgcctgtaatcccagcactttgggaggctgaggaaggaggatcacttaagcccaggagttcaagaccagcctgggcaatatagtgagaccctgtctctagaaaataatttttaaaaattagctaggtgtggtgacacacacttgtagttccagctactcaggaggctgaagtgggaggatccttgacttgaggaggtcaaggctacagtgagctatggtcgtgccactgcactccagcctgagcaacagagtgagactctgtctcaattttttttctttcttcagtaataaattaaccttagcttactgtaacttttcaactttgtaaacttaaattttttaaccttttgactcttttgtaataacgcttagcttaaaacacaaacacattgtacagctgtacaaaaatattttctctttatatccttattttacaagtttttttgacttttaatttttttatttttttcacttttacttagtgtttttttttgttgttgttgttaaaaatgaagatataaacacccatactagcctaggactgtattgggtcaggatcatcaatatcattgtcttccacctccatatcttgtcccactggaaggtcttctggggcagttacacatgcgatgctatcatctcctatgataacaatatcttctagtggaatacttcccaaaagactttcctgaggctgttttgtggtgaccttttttcttttttttttttgagttaatgtattttttataagtagaaagagtacactgtaaaataccactaaaaagtatagtaaatacataaagcagtaacatttactatctgtatcaagtattatgtactgtaaattactgtacataattgtatgtgctatcttgtacttttatataactggtagtgcaataggtttgtttacaccaacatcaccacaaacatgtgagtaatgtgctacaacattatgactgctacatcatcactaggtgataggaatttttcagctccattataatcttatgggactactcttgtacatgtggtctgttattggttgaaacgttgttatacaacacttgactttattgtattgctatctatttctccatttctgtgaatgtttgcctcatatatttaggtgttttaatgttgggtgcatatgtatttataattgctatgtccttctggtgaattgaccttttatcattatataatgtccttctttgtctcttatgacactttttgacttaaagactattttgtgtgatgtagctgtttccacatttgcactcttttggttacaatttgcatgaaatttttttaatatcctttaactttcaggctatccaggtctttaaatctaaagcaaatctcttgtagttagcatataattgggtctttaaaaaaaatcaattcaaccactttgtatcttttgattgggggagtttatcccatttttatttaaagtaattattgatagggcataacttactgttgcctctttgttaattgttgtttgcagcttgtagactttttgctcctctttcctcctcttactgtcttcctttgtgttttattgagaattgtaatgctatgtttttgttcctttcctgttttcttttgtatatcttccataggtattttctttgtggttaccatggggcttacattttaaaactcttataaaaatgtattttaaactgatagcatctttactacaatcacaaaacaaaactcattatgtttacttctcccctacccaaattttatgttattgatgtcataaatacatctttttatattgtgtatacattattttatagttagtttttctgtacttttgtcttttaatcagattttaaaatatcagattttaaagtgacttttgtaccaccattacagtattatagtattctgtttttatctatatatttatctttactagtgagctttatactttaataaaatacctatgtatttctgtttagcatcccctaattttaactcaaaaggccccctcttaacatttcttgtaaggcaagtctaattgtgatcaccttcagcttttgtttaactgggaaggtctttatctctttttcatttttgaagacaaactttggtggatttggtattcttggctggcagttctttttcttttcagcactttcagtataacatctcacccctttctggatggcaaggtttctactgagaaatctactggtagagttaggggtgttcttttgtacgtgatgaggcatttttcttttgctgctttctaaattcttaacatttcttggatcttgatgtccatttccttcctcatatttgggaagttttcagatgtaattttaaaaaataagctgtctgtccttttctcttatggcttcttcttttgaaactgtcataatgagtagagcagcctgctcgaggatgtcctatcaatttcttaggctttctttactctctttcatttcttgctctttttgctactctgtctggataatttcaaatgatgtgtccttgagttcactgactcattcttctacttgattaagtctgctgttgaacatgtctgtaaaattttcagttcaattattgtattcttcagttccaaaatttctttttagttcttttgaatattttctatctgctgaaattctgattctgcttatgcattattttcctgagctcactgaacatctttatgacaattattttgaatactttgtcaagtaattcacatagctctatttctttaggtttggtttctggaggtgtgtttgtgtgtgtgtgtgtgtgtgtgtgtgggcacgcactatttgattgggccatgtttcctgttttctcatattccttattactttgtgttgatatctatacatttcaaaaaaacaaaaaacaacaacacaccagctacctcttccagtctttatggactggatttgtacatggaaagatctttactaatcaggctggctagagattctagggacctctcaaaccttttctgtggatgcatcttctatggacttgtgtgtataattcctaattagagggatctgccagcttttttttttaagatgctctaatctttttccctctgtggtgtctgtgtgctgtactgtgggccctctggagcagcagtattcactcagctcttttaggttctgagaagccctcagttatagattctgctgaatcctatcagtgcctggagtcaagtgagacagaaacttggactgcccactaaaattcaggaactttggatgcattttactctctctttccctcatgagagagagagtgctgagctgagtttctctctgtgtgctgtatcacaggtcctgaggagcatcagcccgccacccagctctttattattctgagctgccctcaggattttagaatatgccaggttccatcagtgctctgagatatgcaagacagctcccctgaaaagtcagaacactgaatgcatgctttactttctctttcccttctcagggagaagacaggagctgggaatttccccctgtttgaatggaactgtgctgctggatgggactatagggaaagtgccccagaaaagtgcccagctagttttacacttgcttggagcccaggaccctcttaactggtttcggcacttatcaccatgggaattggtccttgtattgttgttgagttggtatacctgtggagggtctggggattcctataacagcatcttgctgatgtcactacctctgttatctttttaagctatatatgcttttacaaattattttattgatttcctcttttgttgattataacacacatccttgacttattacctcaattaaatcaataattttaataattccaggcaacgctaagaccttgaatcattataccatttacttgtaccctactttttgttactgatatgcctttcaattatttatatgttctagacacacagtacattattatcattgttttgttaacacctatatatgtttctttctgggatcattttccttctgaagaaattaacatttcctttagtgtggcctgctggtaaagaaacctttacgtttttatatatctggaaatgtcttaattttactatcacttttgagaaacagttttgggtattgaatgaaagttatttttgccagcacttttaagatgacattccatggtcttcttttgagatgatggctgtcaagtttattgttcaattagtgtgtctttttttctgtctagctactttgtatacttactctgtttttcacttttaacagctttactatcatgtgcccagtgttaatttgctttgtttttaatctcgcttgcagttttcaaagcttcttatatctgtgggttgataatattttatcagtttaagagaagatttagcagtatgccttcaaatacggcttctacttcatattttctcttatattcttctgtgactataagtacatgtatgttaaatcttttcaccatattccttgtcttttatgtgccatttctgtttttaaatcactttttctctttgtttcataatccatgttttattctgacccatcttttactttaggaattttatcttgttattctaggccactgtcaaagtcattgattgaattcttaacttgaatcgtggcatttttccattttagaattttattttcctttttaaaaatatatttctaacttgggtactggctaatgtcaaaagaaactttcctcccacaaagttttcactcacttgatcttggattttaaaatcagatataacctgagagattatcatttttctccatttaataatgaatcaggccaggcatggtggctcatgcctataatcccaacacctgtgtgggccatgacaggaggattgcttgagcccaggagttcaagatgagcctgagcaatatagggagactccatctttacaaaaaatgaaaaaaattagctagatgtggtggtgcacacctgtggtcccagctacttgggaggctgaagttggaggatggcttgagcctgaggctgcaatgaactttgactgtaccactgcactccagcctcggtcagagtgagactctttgtcacccagttgtatagaatcaactataggtagaggcataaaaaagatgcctgagattgcatctcttgaatttagcttcattgtccctttctattaagtgagattatttgacatgaacattgatattcactatctcagggatatgttagaactattctcatattttctatccacagaggatatataatatggatattttagcacattcccttatagggcagttataccttcctctgtgactcattatacaggcagcgctaagatgtgtattatatgctcatggtatcctttcttactatccttataatagaataaattaatttttatacagaattaatttttgaagaatcaaatgacatatgtgcataaattatttatacatttttatacaattgcttcaacatttcctcttctctgcaatctggtatatctatataatttctatagataagagaagaaaaatatagcttattaaaattttattctgggttttgtaaggaataaaggacatttgtacccttatgaagattaaattttcttgtgttagtatatttctaaaggcttttagtgaattaaatggagacactttaatatactacacagttttaaatctaaatttttttctcaaggaagaacttctgtttacacaatgatgcttaaacatgactgaaatatctaaaggagaggttaactggatcagtcaagaaaataatctgtaacatttgattgaagaaaatagcttagaagaagattttttaaaatgttcttttcctgtggagtctcccatgaaattcagattggataatctatagttactgagaaaggaatattcaaaataagagttgatcactgtagcacaaatgcaagtgataatttaaaaagtaaatataatttaacagatatgaaagtgaatcaaaagtcaagagtcttgtttcctcctgaaatatctatataagtacatgagatattttttccagactgagaggagcatgtgaactgatattgttgatgactttttctccattgagtatatcttttaaaatactcagtatttatcataatactctgcagattacaatgtacacattgttaatactacattgttaatttgccttttaaatacttaatatttacttttttcaaaggttatctttgtgtattttgtataaaattctactataatttattccatagctttgtagttttacattatttactgttatataatagaaagtggctaacatcagctaatgctgttttctaaatatttattatcattttcttatgtttttaaccattgtgtattaaaatatttcaaaattatcagtatgaaaactattaggcaaatagtctgggaaattgatttgtgtttcaacgatccaaatattagtgaaaagtcatgataatagagatagtaaaaatcttataagggaactggtaaatatatctttaaagattgtatcagaaacaattctatgacaatatcttgtttctttacaagtttgaattccagaaatcaagtgaatttcctctgactttgcattttctggtaatttcttttttcttatcaagctatattttaaatgtaaaagtatccaacaatagaattgctaatctcttggtccctcttgtcttcacaggtaagggatattttgtaatatttaaggaattttatggagtatatatacaagcagaatgttagctatttcttcaatagaaaacttggtgatattttcttttgcccatatttattaagtgaagtttactaaattttctaggtcgtgttcaaatcataccatccagtaaacagttgggagattaaaaagtaattaaactaatataaagatagcctggttaataaaatgatattcttttcaacatgattatatttactggaacctaaacattttgtgaaatagtatgtcatatagacaatattaggattttgacttgttatgtaagtacaaaggtatgtattttacaatttttaataattgctttatcagtaatagcaacttgaagaaatgctatctagatgcttctaatttgaaaatagtgcaaagacgatttaccaaagtcgttctattatgcttttgatttctagaaagctgaaatatccccattacagtttttgagtcaatacaaaaagtagataggtgttatagataaagaaataggttttcatcgatttgaaaattagaactccgagaagaaactcaggtaagaatgccattaaaatagttttagttgtttttgaaaataacatcaacaaaatgtcactattaaacagtgaaattggaataaaaatttgttttatgagtaacacggagatagcatacaaacattccattgactaatacagaaaaaactcaaaagttttaattagatatgtttaaatagagatgagaaaagtcaaaactttaactcttaaaagttatttttatcagtttggaaatatataaactcctccctatataaaatacaccagcacaaatttctctagtaaggattggggtttcatgactttagatgtatttttctgtaatattttaatgacgcacttatattgacgcattttaagatagagtttaatgatatattttgactagagataagtgatttaaagaataagaatcatgtcattgaaagtgagaatacttgagaaatattgacgaatataagctaaataaagcaaaacaaaataaaacacttaccctttcatccacatgatgtcgctggacaccggaaggtttttctcccttcccagcctcaaaggaatacagtgagtagattttccttagacagaaaggaaaagaaccttccatttttggctgtgccaagaagctcagaaaggcgataatataaaaaatatatagttaattgggaattgaatttacaaaatacattgtgtggtgatgcaatagaaagctcataattggaacgagattgagatggtatattcccggagaggaagtctgggatcccggctcctgctgctctggcttctccttgcctactggaaggcagggagcggccagctccactactcgatcccggaggaagccaaacacggaaccttcgttggccgcatcgcgcaggacctagggctggagctggcggagctggtgccgcgcctgttccgggtggcgtccaagggccgcggggaccttctggaggtaaatctgcagaatggcattttgtttgtgaattctcggatcgaccgggaggagctgtgccggcggagggcggagtgcagcatccacctggaggtgatcgtggacaggccgctgcaggttttccatgtggaggtggcagtgaaggacatcaatgacaatccgcccaggttctccagacaagaacaaagattattcattttagagtcaagaatgccagattcgcggtttccgctagagggcgcgtcggatttggatattggagcaaatgcacaattgagatacaggttaaatccaaacgaatattttgacttagatgttaaaacaaatgaagaagaaacgaactttttagagctggttttgaggaaatccttagatagagaagaaacacaagaacaccgtttattagtgattgcaactgatggaggaaaacccgaactaacaggtacagttcagttgttgatcaatgtattggatgctaatgataacgccccagaatttgataaatccatttataatgtcagattgttggaaaatgcaccaagtgggacattagttattaaactgaacgcctcagatgcagatgagggcatcaataaggaaatagtgtatttctttagtaatcttgttcttgacgatgtaaagtccaaatttataattaattctaatactggtgaaataaaagttaacggggaactggattatgaagactataactcatatgaaattaatattgatgccatggataaaagtacattcccattatcaggacactgtaaagtagtagtgaaactcctggatgtgaatgataataccccagagatggccataaccacccttttcctgcctgtcaaagaggacgctccactcagcacggtcattgctctgatcagcgtgtctgaccgtgactcaggtgccaacgggcaggtgacctgctccctaatgccccacgttcccttcaagctggtgtccaccttcaagaattactactcgttggtgctggacagcgccctggaccgcgagagcgtgtcggtctatgagctggtggtgaccgcgcgggacgggggctcgccttcgctgtgggccaccgccagcgtgtctgtggaagtggccgacgtgaacgacaacgctccggcgttcgcgcagccccagtataccgtgttcgtgaaggagaacaacccgccaggctgccacatcttcacggtgtctgcacgggacgcggacgcgcaggagaacgccctggtgtcctactcgctggtggagcggcgggtgggcgagcgcccgctgtcgagttacgtttcggtgcacgcggagagcggcaaggtgtacgcgctgcagccgctggaccacgaggaagtggagctgctgcagttccaggtgagcgcgcgcgacgcgggcgtgccgcctctgggcagcaacgtgacgctgcaggtgttcgtgctggacgagaacgacaacgcgccggcgctgctggtgcctcgagtgggtggcaccggcggcgcagtgagcgagctggtgccgaggtcagtgggtgcgggccacgtggtggcgaaggtgcgcgcagtggaccctgattcgggctacaacgcttggctttcgtatgagctgcagccagcgcctggcagtgcgcgcatcccgttccgcgtggggctgtacacaggcgagatcagcacaacacgctctctggatgagaccgaagcaccgcgccaccgccttctggtgctggtgaaggaccatggagagcccccgctgacagccacagccacagtgctggtgtcgctggtggaaagtggccaggcgccgaaggcctcatcgcgggcgtcggcgggcgctgtgggtcccgaggctgccctggtggatgtcaacgtgtacctgatcatcgccatctgtgcggtgtccagcctgctggtgctcacgctgctgctgtacaccgcgctgcggtgctcggcgcagcccaccgaggccgtgtgcacacggggcaagcccactctgttgtgctccagcgcggtggggagctggtcgtactcgcagcagaggagacagagggtgtgctctggggaagctccacccaaaacagacctcatggccttcagtccaagccttcctcagggtcccacctctacagacaacgtgagttttctaatattaacatccatctttccctcccaattttcaaatattaaatgtcacattcacccactttttttgtatttaaaaattatgtcttagtacacaaatattgtggtacacaattattgcactaattcatgtattatatgctttttatgaggcttttctgctggggtaatagattcatcagctttctgtgatattaagtgtttttaaaataatattttatattagcatttgaattttgcatctctaaaaatgtaggataataattgtaagacatagtttggagtcattctcaaagtttcagtttatgactacatgaaaatttattttattttattgttattttttagagaccctttgttgcttagtctgcagtgatctgatcatagctcaccgaagcctgaaactcctgggctcaagtgatcctcctatctcagccgcccaagtagctggactacatgcacatgctaattaaagttttttttttttttttttttttattttctgtagagataggggtcttgctactttgcccaggctggtcttgaactcctggtttgaagccatgctcccgtctcagcctcccgaagtactaagattacaggattgagcaagagtgcctggcctataaaaatgttttaacaccacccttccaattttgcctttttgtttctattgaatttaaattaattattattttattacactaatttagtttgttttcaattgtatttttgcagcatatggtttatttcaactttgcctaagcagttcacctgtatacccatgatgaatttgataattgtaatttaaaaattatatttttcattttattgattttttgaataggaaacacatatacatggtttactgttctaaaggtgcaaaagaatacagttaaattttccctttcacctccttcatgaagccaaaacattctctggtatccttctagagatttttttcatatacaaataaacttccctacccccttaaaaaacatatgagtattgattttaatcttgcttttttcatttactaatgtatcttgatgatcatgaattatcattactgaagtagatttgtttttcttttatctggatctatggtgttccattgtgtaggtatgtgattggttatttttcccttaacattaacatttagtggaacaatgatttaattttctggaaatttgcatatttttcaatatatctaatatatattagatatataaatatctaaaatatctaatatatatctaatatattatatattttatataatatatataataaatatataataataatatatatcagatattttgatacagaattttgctcttgttgcccaaacgagtgcaatggtacaatcttggcctcccaggttcaagcgattctcctgccttatcttcccaagtagctgggattacaggcatgtgcccacacctggctaattttttgtatttactagagacggggtttcaccatgttggtcatggtggtctcgaactcctaatctcaggtgatttacccgcctcggcctcccaaagtgctgggattgcaggcatgagccatcgcgcctggcctaaattattatattgatgaggagtaactgtgaatctcctcagttgtgcaaattctactatattttggttgggaaattttactgcttgttgttacttttagattaaaaaaataaatataccatgatacaaactcccctcttgagttgtttacaaagagttgtttattaaagctgtatgtttgagactacgctagacaggtgtcctctccatctgaaataatgagaaccatttgtctactcttttgaggggaaaagtatggatttataggtagtaaatagtccacactttacatgataaaatgtgaattccctatttctgttgctttgcctgtttcttttattctcatatgcattcaattttataagtacccttctatcatgctatttatatattcctaatatcctgagctactttgaggaagtcctagaaattgagaaatagtttttgtcattctataaatctaaagttaacaatggtcacattttaaaaaatcaagttttgtgatataaactatttatatatctctttatatatcaagtctttatgtatattttgtgcagcttgtcttttttataggaacctcttgttttggggattgtttttggttaagaaattgaaccctttgtttgcccaaaataactgcaatagaaagtcagtgataagaactactaaatagatccaggttaattattttaagatagaatttcacatggaagaaaaggctttgtgtcacaatcatctgtgaggcattttactgtatatcagaattttggagtaaggtgaagatgatcatgtcatttgaaaagtcttattggtgactctatttttctcctttgaaggaggggtttaatcacttcaaatggataacattaaggttaaattaagggcgaagttgatatttggccctgacttttatatgaaggtaacatttttgcaagtaaattgtagacgtaattaaaaaaacccagctaaaacaaaggtggtattgagaaagaggaagagcaagtggtctatattgtcagaaaaataagattcatattggagagtaattgaaaataacctgcaaaaagttgattacctaacatgtgattacatattaggttactagaagtttctcaagtgtcttgcaatttctaggtttagtaaaattcaatgaaagctgtactcataaagataaatatgatagcatgtgaaagacagatggacttaggtggatgtggaataaggcaagccagggaaaaggagtaatttaaaaagtaatataggtgacatgggaaatgctcatgtcattaaaaatatgaatttaaaaatttgaatttggggattattaataattgctcatgccttgctatttaacaaactattttctaggagtcagcatgtataggtgaaagtgacaattagaaacatagaaagaagggatgcagatatggatttgtaaatacctcaataaaagtcttattcaaaacttggaagtgagtgagaacaattaaaggaaaggatatgggacagggttgaagttgagagagaaaaacgagatcatttaggaacagctgaagaatcaaaaacagcaaagcacaatgggtagaaattccactagaatttgaagtggtgaagtatatgaaaagaaaatattttaagcaagaatcctaatataagctgcagataaattaaatgtgataaagaatatgctctagaattttatcttccatcattacacagaagaaccttaagagcatctgatatttattgaacaaagaaagcatggacttcaataatctataaggctttaaaaattcaaccaaaatttgataattttaagttacattttttccctagagcactatataatagcatgtcctaggaaagacagatgtgggcaagtttcttttctaccaagagtgtagaatagtttacatttctgatttaaaaagcagttccgttaacacttaaatttgctgaactggttgatattaatgttgcaaatattggtagaaaagttgtttagctgtgaataattagatcccttactttaaattaataaaagaagtcgggataacactgaccgtgcaaattacaaacgtgaggagggtttactataaaagtagagaaaagaagatactgttttaaaaatatatggtatagcactgttacgtgaattgatttcttaccttttggagccgcatgatgtcgctgtctaccatgaagttatagctagccaacattcaaatttcttctattactgcatcattccctgactgttgaatgatggcggacgcagaagaaatggattaataaattccggaacatacagtattttatctttatgcggaagatcttctaatggaaataaaaccagaggtatttgacatggtgtttaccccggaggatagattgggaaagcaatgtctgctcctcccgcttctgctcctcgcagcctggaaggtggggagcggccagctccactactccgtacccgaggaggccaaacacggcaccttcgtgggccggatcgcgcaggacctggggctggagctggcggagctggtgccgcgcctgttcaggatggcctccaaagaccgcgaggaccttctggaggtaaatctgcagaatggcattttgtttgtgaattctcggatcgaccgcgaggagctgtgcgggcggagcgcggagtgcagcatccacctggaggtgatcgtggacaggccgctgcaggttttccatgtggacgtggaggtgagggacattaacgacaacccgcccttgttcccggtagaggaacaaagagtgctgatttacgaatctaggctgccagattctgtgtttccactggagggcgcgtccgatgcagatgttggctcaaattccatcttaacctataaactcagttctagcgaatacttcgggctagatgtgaaaataaacagtgatgacaataaacaaattgggctcttattaaagaaatccttggacagagaggaagctcctgcacacaacttattcctgacagccacagatgggggcaaacctgagctcacaggcactgttcagctgctggtcacagtgctggatgtgaatgataatgctcccactttcgaacagtctgaatacgaagtaagaatattcgaaaatgcagacaacggaacaacagttatcagactgaatgcttctgatcgggatgaaggagcgaatggggcaatttcatattcttttaatagccttgttgcagccatggttattgaccactttagcatagatcgaaatacgggagaaatagtgattcggggtaatttggattttgaacaagaaaacttatacaaaatcctcattgacgccacggacaaaggccatcctcccatggcgggtcattgcaccgttttagtgagaattttggataaaaatgataacgtccctgagatagcactgacttccttatccttgcctgtacgtgaagacgctcaatttggtactgtcatcgccctaattagcgtgaacgacctcgattcaggtgccaacgggcaggtgaactgctcgctgacgcctcacgtccctttcaagctggtgtccaccttcaagaattactactcgttggtgctggacagtgccctggaccgcgagagcgtgtcggcctatgagttggtggtaaccgcgcgggacgggggctcgccttcgctgtgggccaccgccagcttgtctgtggaggtggccgacatgaatgacaatgctccggcgttcgcgcagcccgagtacacagtgttcgtgaaggagaacaacccgccgggctgccacatcttcacggtgtctgcgcgagacgcggacgcgcaggagaacgcgctggtgtcctactcgctggtggagcggcgggtgggcgagcgcgcgttgtcgagctacatttcggtgcacgcggagagcggcaaggtgtacgcgctgcagccgctggaccacgaggagctagagctgctgcagtttcaggtgagcgcgcgcgacgcgggcgtgccgcctctgggcagcaacgtgacgctgcaggtgttcgtgctggacgagaacgacaacgcgccggcgctgctggcgcctcgggtgggtggtactggtggtgcagtgagcgagctggtgccgcggtcactgggtgcaggccaagtggtggcgaaggtgcgcgcagttgacgccgactcaggctacaacgcgtggctttcgtatgagctgcagcccccggcaagcagcgctcgcttcccgtttcgcgtggggctgtacacgggcgagatcagcaccactcgtgtcctggacgaagcggactctccgcgccaccggctgctggtgctggtgaaagaccacggtgagccggcgctgacagcgacggccacggttctggtgtcgctggtggagagtggccaggctccaaaggcgtcatcacgggcgtcggtgggcgccgcgggcccagaggcggcgctggtggatgtcaacgtgtacctgatcatcgccatctgcgcggtatccagcctgctggtcctcacgctactgctgtacacagcgctgcggtgctcggcgccacccaccgagggcgcgtgcacggcggacaagcccacgctggtgtgctccagcgcagtggggagctggtcgtactcgcagcagaggcggcagagggtgtgctccggggagggcccacccaagatggatctcatggcctttagccccagcctttcaccttgtcctattatgatgggtaaggcggagaatcaggatttaaatgaagatcatgatgccaaagtaagtgaattttcataattaacagttaatttttattttaaatttataattgttttcctcatatttgtcttctatatttctgtttttaatttttaattaattttacaaaattacatattttcattttattgtgtttcttattttaatctctttgcttctttaatattcataatttaagtgaaattagaaatcactgtccacaatctgcacctcagaatttttgtcttcaaaccaaaatattcttggatatgtcgttttctgttgcattttaattcagaatcatagtagcatttttttctgattaattatatgggattttcatttgtttgcctttgagctttaggataatttttttacatatactcttttttgatcatatattgaaatttgagcaccagtgtatcacttatgtttttacactttccatttcaatgtttttctgtcgacacttttattaagctaacgctttgattttatccattttgtgtaagaactctgatcatcatagtttttatctgtggttcccttttcagacttgtgattccgggaggcaatagtgttcatttattgtcccccttttaaaccattgaggaataaaggacaaaaacaatagttatcagcctgaatacttctggttgttatggttattgatttatttactaccgatctaaataatggaaaaatagtgattcaacagaatttagaccttgtgatcaagtaaatttatatgaaaactgcattcctctggcattgcggctctcttatttctgtttgaatttcacttgatggtcttctcttcatggagtctaaatctatttctttgtattagtgttttcattgtttctacacagtaatttaaactattcactattttgtatgtgtgtgtgtgtgtgtgacagggtcttgctctgtcacccatgctggagtacagtggtgcaataatggctcactgcaccctcgaatgcctgggctcaagtgattctctcacctcagcctctggagttactacacacgagcaccaccatgccccccaccttttttttttttttttttttttttaagagatggggtttctccatgttgcccaggctggtctcaaactactgggtgcaagtgatctgcccaccttggcctcccaaagtactaagattataggtgtgagccactatgcttggctagtcattatttctttgaatgaaaagcagcaaaaagtagtgattaagtgtgagttttggtgttatcctcccttgcctaaatttcatcgctaccaattttgttttgtggatggattgtttcacctctatttcagtttcttctgtaaagttggaatgataaacactagtttcaatgatagaattgtcataaagctttagtaagttgatattgtaaggcgcttataactgtgtttgccaaatagcaagtgcttaaaaaatttgctactagttttccgaagaggaaaagaaaaactttatgtcattttatgctaggaaactctcattacggattccatattgttttcattttacgtaaagattgaatttttgttattcatagtgaggccataattaccaatttaatctgagatgtctctaacattttaaatgccatgttctacattaaaagcaatttaaaatgtgtgtttcaaagttgaaaattgaattaagacttggacagtggaaaagttttatgaattcaaaagacatttaacctgctgagtcctcagtgatttcctggagttggttttgactttttgtgttgtccatgttcccaggaaatattagactacattaagcatgaatggtgtatttgcccacatttaaaagttgcttaagggccattagaggactgagttgtggtttgtgtttcctaatgtgagcattttccattcttgaaatggcagaaactggtagtggtattttctgttttctaaaagaagtacatgataatttttaagcgtgtaattaatattgcactaaaatttaaaaaaactaactctacatacttaagagtggcagaattgtctctgattatactgaagatcaccatttgtgtagctaatgatatctaacagcctcaaaacagcatactttcttaggaagtagagaactatagcgttgctagtgagtaaatgttttttaaaaagttcctaggagggtctttaagagtatcacactgtgcctgctgagaatcatcgaattaacaagacctggcttcaaatttaatagataaataaaggtaagtatcctacataaatacgatgatagtaaaagcaagaatattgtaagaggtgctagaaaggtacatcatagtgttattggaattggaaaaaaatctttgcctttttcccttgttgaaggagaccgtgaagagtcatgatgttttactggttataaaatggaaagagttttccctgggagaatatggagactaacaggtattcatgagaagagagtaacttaagtgagtatacagaaaattccaaatgtacctagaaatgaggaatagtccactttgggtaaagcacatggttcccataagagagagtgtgatataaagcaagaaaagtaatatgagaaaaaccttttgtataactttgagtactagacgagtaattttgacactcttcaaagtcatttgaaagctgtcaaaaagtgtgaagcaatacgaataaaaagtattaacggaagatgactgcaaggattaaatgaaggagaatgaaataggaatggacaggttacacaataagaagctactgcaatacaccaggagagcagcaattataaaaacttatttaggaaagcatctgaatacagacataattattttacatgccattgggaacattggagtgaaacattccagaaaacgaacacagtaaggtagatccaaaaaggatgaaatacctcaagacttgatcaaagggctgctgtatgtgagatggctgagcactgaaatttatctaataaaataaacttacattttaaaagaaataatacaaatcatatttgagattgtaaaaataggcatatattcataacacacaagtgttcgaaaggatagaatgaggaaacaaatataaaatgatgaactcctgaaacagtatatatagattctgctaaagcaaaaaattcagaatacttcctcctcaaaaagttcacatgatacaaattcttccccttcaaagattccccaaaccttctcttattttgttttcccaagagaagtgtctggatagttgctaatgtttcttgcctcctaaaaagaaaacacacacacacacaccgctttctaagtttctctttcatcaatcagtagattcttgagatcctgggtccctaaaagagtacaggatttttcttaacaagcgatactgaatcaagaatatgaagtttcctgggatctagatcaaaggaatttaaacttgcagttgtttaaattcatgttgtcacttaggtttctatctttatttaaaactgtgtgaaaaaaaagtttttctaaggcatgaggaagctacagttctggtaacactgagtattcaaaagccatcagtcgcctaagaatgcttctaacaatcatgagaaatgctattttaacctttaacaacaatgaagaaaaaaattcagagtttgaaataaaacttttcatctgattaatagtttgtaatggtttgtaattcttacttacatgatggccacatgatgtcgctctttaccgcaaattctttcgtaatcagcaaaaggaagtcattccttttcgcactggaaagacgctccactctctttcactctttggatgcacaacaatggccacacatcgagattgaaatgaagggataaaaacattcctataaattcgaaggcaagttttgctgactagaaaaacaagccaataatttgaaatggtgtgcccgaatggatacgacccagggggccgacatctactgctgtttattataattctagcagcttgggaggcagggagaggccagctccactactcggtccccgaggaggctaaacatggcaacttcgtgggccgcatcgcgcaggacctggggctggagctggcggagctggtgccgcgcctgttccgggcggtgtgcaaattccgtggggatcttctggaggtaaatctgcagaatggcattttgtttgtgaattctcggatcgaccgcgaggagctgtgcgggcggagcgcggagtgcagcatccacctggaggtgatcgtggaaaggccgctgcaggttttccatgtggacgtggaggtgaaggacattaacgacaaccctccggtgttcccagcgacacaaaggaatctgttcatcgcggaatccaggccgcttgactctcggtttccactagagggcgcgtccgatgcagatatcggggagaacgccctgctcacttacagactgagccccaatgagtatttcttcctggacgtgccaaccagcaaccagcaggtaaaacctcttggacttgtattacggaaacttttagacagagaagaaactccggagcttcatttattgctcacggccaccgatggaggcaaacccgagctgactggcaccgttcaattactcatcacggtactggacaacaatgacaatgccccagtgttcgacagaaccctgtatacggtgaaattaccagaaaacgtttctatcggaacgctggtgattcaccccaatgcctcagatttagacgaaggcttgaatggggatattatttactccttctccagtgatgtttctccagatataaaatccaagttccacatggaccccttaagtggggcaatcacagtgataggacatatggattttgaagaaagtagagcacacaagatcccagtcgaggctgtcgataaaggcttcccacccctggctggtcattgtacagttcttgtggaagttgtggatgtaaatgacaatgctccacagttgactctcacttccctgtctctccctattccagaggacgcccaaccaggtaccgtcatcacattgattagcgtgtttgaccgagattttggagtcaacggacaggttacctgctccctgacgccccgcgttcccttcaagttggtgtccaccttcaagaattactattcattggtgctggacagcgctctggaccgcgagagtgtgtccgcctatgagctggtggttaccgcgcgggacgggggctcgccttctctgtgggccactgctagcgtgtccgtggaggtggccgacgtgaacgacaacgccccggcgttcgcgcagcccgagtatacggtgttcgtgaaggagaacaacccgccgggctgccacatcttcactgtgtcggcgggggacgcggacgcgcagaagaacgcgctggtgtcctactcgctggtggagctgcgggtgggcgagcgcgcgctgtcgagctacgtgtcagtgcacgcggagagcggcaaggtgtacgcgctgcagccgttggaccacgaggagctggagctgttgcagttccaggtgagcgcgcgcgatgcgggcgtgccgcctctgggcagcaacgtgacgctgcaggtgttcgtgctggacgagaacgacaacgcgccggcactgctggcgcctcgggtgggtggcactggtggcgcagtgagagagcttgtgccgcggtctgtgggcgcgggccatgtggtggcgaaggtacgtgcagttgacgctgactcaggctacaacgcgtggctttcgtatgagttgcaaccggtggcggccggtgcgagcatcccgttccgcgtggggctgtacactggtgagatcagcacgacacgagccctagatgagacggacgcaccgcgccaccgccttctggtgcttgtgaaggaccacggggagccctcgctgacagccacagccaccgtgctggtgtcgctggtggaaagcggccaggcaccaaaggcgtcgtcgcgggcatcgttgggcattgcaggcccagagaccgagctggtggatgtcaacgtgtacctgatcatcgccatctgcgcggtgtccagtctgttggtgcttaccctgctgctgtacacggcgttgcggtgctcagcgccgtcctctgagggcgcatgtagtttggtaaagcccactctggtgtgctccagcgcggtggggagctggtcattctcccagcagaggcggcagagggtgtgctctggggagggcccacccaagacagacctcatggccttcagtcccagccttcctcagggtccatcctctacagacaatgtgagtcataaataatcttgtttccaacaattttaaaacaattagttcaattggtctccttaaattttctttcataatttcttttttagttgatagctttatgtataattattattttttaatgttatgctgtatttgcactaattatttggaagtacgtttaatatacacttttgttttgggatgcgtaatactatagatcaaaatctatggtttatgttggctactctccatttttggaggaggactttgctaactggagcaatggattcacctttcttctatagtgtatttacaaaatcaaatatttacatttccatattttgataatcaatacctataaatgttatagtaaacaaatttaatatatatgttacctaatattttattctatgtattgtcctcattttataaaatatagctgtgtcaaaatcatctgttcaattttgcctttttatctttagtctagaacttgaattttaagcatttcttttacatctatttatcttctttttatcatatttgtgtagcactgacttctttttaacttactttgttgagatgtatttgccatgttcatgaagaattaatatgaacaatttaaaatagtttaaatggcagtttaatagtattttttattttgttccttgtttgtataagaaatatattcacattcaaaatttcaaagagtgaaatctagtacgtagtaaaaaatctccttgcctcctcaaaccccaaaccatttactttacctttctgaatttctgaagcagtttactttttttgtatattcccaagattattattgccaaattatataaatatatttacaatcaccaaattgtaaatcgccaatatatatattttataatttgccccttccttccttccttcctttctttctttctttcttcctttttctttcattctttttcttttttctttcttctttcaagacacgctctcactccatcacccaggctgctgaaatgcagtggtgggattatagcccactgcaacctgaaagtcctgggctcacaggatcctcccatctcagcctctggagtagctgggaatacagtttgcatgtcattgtgcctggctaattttattttatttttgtagagacagggtggagtcttgtttcccaggctggtcttgaactcctggcttcaagcgatcctcctaccttggcctcccaaagtattgggattacagacacgaacaaccacacccagcctgcctttcatctttccttttttttaaaaaaagaagtgattacagtagaaacctacctttctgcactttttggttttccactttaagttatatatatatagtgtgtgtgtgtgtgtgtgtgtgtgtgtgtgtgtgtgtgtgtgtgtgtgtgtgtttgacagagttttactctgtcgccctctctggagtgcagtggtgcaatctcagctcactgcaaaatccgcctctctggtacaagcagttctcatgcctcagtctcccaagtagctgggattaaagacgccaacaaccaagccatgctaatttttttttttttttgtatttttagtagaaacagagtttcaccatgttgccccggctggtctcgaaatctgggactcaagtgatctgactgcctcagcctcccaatgtgctgggattacaggagtgagccaccgcatccggcctaaattatatattgggttttgtggcatattatttcattagcgcttattccttgtttttgattatttgctttcttatttttaaaagtatttgcatcttattttcttttatggatatatcatgatttattcatccagtactgtattagggacattaatgaaacaataaccgaattgtctagacttttaaaaattttttacaaataatttggttggtcaaaaaaatgatagttaacggggcatggtggcacacacctttaaccccaacatttcgggaggccgaggcaggaggattgcttcagtctagtagtttgagaccagcttgtgcatcttttgtagagactttgtaaaattagctatgcatggtgatgcatgtctgtagtttcagctactcaagaaactgaggtgggaggatcacttaagccagggaggtccaagctgcagttatcatgccactgaactccagcctaggtgacagagcaataccttgcctcaaaaataaaataaaatgaaataataaaataaaataaaataaaaacccagaactgacaattttcactgttcctaatattctaatatactttagtaaattattttaggatatgttactgttttcttttcaacgtgaataaggatagaggtatgcaaagtcaaaaacctgtctgataatcaatagaattatttaccattaagccataatatgtcattcacataagcagaccaagtttgctgctcttgttgaaagatattcagttttgtggaaaaatctataaatatctttgaccttcaaagatgtaactgtaatctgtttttattgctttgcttttatgcttacatgcatgtatatttaaaaccttcctagcatattattaaagttttaaatatcctatttatattgggaaatacctgaagttgataggggatcctccttagccacctaagctgtattcatcaattattatgatgatgatgatgattattatttttgagacagggtctcactctgtagcccagactgcagtgcagtggcacaatctgggcttactgcaatctctgcctcctgggctcaagtgatcttcctacctcagcctctcaagttgctgggactataggcacacaccaccatgcccaactaatttttgtattttttgtagagatggggtcttaccatgttgcccaggctggtctcaaactcctgagatatcgagaaatactattttctttacaaattgtttgctactatttagagtcaactacagagatttttttgggtaaataatgtgatgacaaatttaaatcatttcacagaaaatacccttatttgcctttcctatttaacctacgtttttggtaagaattttgtagaaatttggaggagctcttaattgcctactatgaaggcattcatgatgaatccatggagaatttacttttgaggtggactttgaaagatgaatagaattttgacagaaaaagatgaagtaatagaagaaaaaccttgaacaaagagtgtgccaagaaggagacaacatattttctgtaaaatatgactcctattggaaagtggttagccttagcactgagaagattggctcatggtcacgtagcgtatctcccagatggaagtctaatgtcttgacaattagtcaatagaaagataaacttgttgaagattttagtgaaatcgagtgaaagctgtactaataaggacagaaattatcacacgtgaaaggagagatgggatgtatacaaattttaaatatggtaggcaaaggaaaagaagtcataaaaatacatatgagtaaatgtggagaatcactatgctataaaaattgtgattttttaatgatttgggttttgggtgattattgattagatattcttttaactttggtcgactcattttctaggcaatgttagggtatacaggtaaaaatgtcaggtagaaaatgaaaatagggggttgcagatatggagttaagaatacttcaaataataggctagtttaaagccgtggaaatagaaacgttaaataaaaagttggggaaaaaagtttaaaggcataattctggtaaatactcactttttggagcagaagaaagatgaagaactaacaagccaatgatggcaatactgctagagtttggcatgtcagagaaatcataaaggaaaatgttttaagtgagaggctgaatttaacaagctatagagatatagagaaatagtgtaaagaatatgcacatacatttttattactttagtaaataaaacggttcaggcaatttgacatttattgaataaagaaaagcaaaaatttaacaataagaacacaagaagataaaatgtagaaaagttagaattatatgctcacctcagagtaatatataccagtgtttctggtgaccaaataaatattaatgcatttcttccacacgaaactatggaggacagtttacatttctgatatccatgacatacaggtcatacttaaatttattattaattgatacgatatttgaaatattgggaagaaattcctttccttatgaagaagaaatccctagctgaaactaatgtaaggagccagacagtatgaatgcctctgcaattgataaagttaaggatttactattaaattatgataaagaaatagaaagtgcatagaagaacccagatattgcggaagtaattcatgtaatcattaccttttgaagccacatgatgtcgctgtctaccaagaagttctggttggtcaatgttcaaagtcttttctctgacagcatctgtctctaaaggccgaacaacgggagatgcagcggaattggattaaaagactctgaaagtacagtcgttcatctttatattaagataatattttctgataggaaacgactatttaacatggattatcactggcgaggagagctgggatcctggcgactactactcttgcttctgctcctcgcagcctggaaggtggggagcggccagctccactactccgtccccgaggaggccaaacacggcaccttcgtgggccggatcgcgcaggacctggggctggagctggcggagctggtgccgcgcctgttccgggtggcgtccaaaagacaccgggaccttctggaggtaagtctgcagaatggcattttgtttgtgaattctcggatcgaccgcgaggagctgtgcgggcggagcgcggagtgcagcatccacctggaggtgatcgtggacaggccgctgcaggttttccatgtggacgtggaggtgaaggatgttaatgacaacccgccagtgttccgggtaaaagaccaaaagctgtttgtttcagaatccagaatgccagactctcggtttccgctagagggcgcgtccgatgcagatgttggagctaactccgtgttaacctacaggcttagctctcatgattacttcatgctagatgtgaattcaaagaacgatgagaataaactggttgagctcgtattaagaaaatccttggacagagaggacgctcctgcgcaccacttattcctgacagccacagatgggggcaaacctgagctcacaggcactgttcagctgctggtcacagtgctggatgtgaatgataatgctcccactttcgaacagtctgaatacgaagtaagaatattcgaaaacgcagacaacggaacaacagttatcaaactgaatgcttctgatccggatgaaggagccaatggggcaatttcatattcttttaatagccttgttgaaactatggttattgaccactttagcatagatcgaaatacgggagaaatagtgattcggggtaatttggattttgaacaagaaaacttatacaaaatcctcattgacgccacggacaaaggccatcctcccatggcgggtcattgcaccgttttagtgagaattttggataaaaatgataacgtccctgagatagcactgacttccttatccttgcctgtacgtgaagacgctcaatttggtactgtcatcgccctaattagcgtgaacgacctcgattcaggtgccaacgggcaggtgacctgctccctgatgccccatgtccccttcaagctggtgtccaccttcaagaattactactcgttggtgctggacagcgccctggaccgcgagagagtgtcggcctatgagttggtggtaaccgcgcgggacgggggctcgccttcgctgtgggccaccgccagcttgtctgtggaggtggccgacgtgaacgacaatgctccggcgttcgcgcagcccgagtacacggtgttcgtgaaggagaacaacccgccgggctgccacatcttcacggtgtctgcgcgagacgcggacgcgcaggagaacgcgctggtgtcctactcgcttgtggagcggcgggtgggcgagcgctcgctgtcgagctacatttcggtgcacacggagagcggcaaggtgtacgcgctgcagccgctggaccacgaggagctagagctgctgcagttccaggtgagcgcgcgcgacgcgggcgtgccgcctctgggcagcaacgtgacgctgcaggtgttcgtgctggacgagaatgacaacgcgccggcactgctggagcctcgggtgggtggcactggtggcgcagcgagcaagctggtgccgcggtctgtgggcgcgggccacgtggtagcgaaggtgcgcgcagtggacgccgactcgggctacaacgcgtggctttcgtatgagctgcagccagctgcaagcagccctcgcatcccgttccgcgtggggctgtacacgggcgagatcagcaccactcgtgtcctggacgaagcggactctccgcgccaccgtctgctggtcctggtgaaggatcatggtgaacctgcgctgaccgccacggccacggttctggtgtcgctggtggagagcggccaggctccaaaagcgtcatcgaggcagtcggctggcgttttgggtccggaagcggcgctggtggatgtcaacgtgtacctgatcatcgccatctgcgcggtatccagcctgctggtgctcacgctgctgctgtacactgcgctgcggtgctcagcactgcccactgagggcgggtgccgggcgggcaagcccactctggtgtgctccagtgcggtggggagctggtcatactcgcaacaacagccgcagagggtgtgctctggtgaggggccaccgaagacggacctcatggccttcagcccctgccttcctcctgatctgggatcagttgatgtaggcgaagagcaagatttaaatgttgatcatggcctcaaagtaagtccatttaaatttagaactcataaattctatttgtggaaattgtagttactttaaaagtgtttcagatttagtttttcaccgtattttatagtgaaaatttaaacattgtttagtttttagaaaccttttataattaattgaattttctcagtggcataatacagtattaatcattctccacaagttgggtctatcttgaaactcaagttatggttggatgatatccattttttactgaatatttattttggcctgccttacagccgtcttctctgaacaatactctaaggacgttcagggcattttgatctttggtgaaagtattcccccaaagcgtttattcttttgtccttaggcactgaactcttaatcttactccatatgctgtactttgaaatgcatgttttaaatatgttgtctttatatttacttttattcactttaagatctcggtttattcatcttatctgactttttagtgtctggtagtcacaaatatctttggtgtttcactattgccgttttaagcagtgtagtgataaaatacagaatgatagtgtttttcaaaatttgatagttttcatattcttcctaattttattataaactagttaaaaagtaaaatcaagagggaagagatttgtaatccttcttttaattcattatttagaccattttaccatttggagacatgttttttattctacatgatttttacagttgtattgtcgccaacttaacattttttgagcctctatgtttaggaaatgattactttattcttgcaagtatcttctaaactctaatcattcaaccctttgttcatgagttggaatattttcaataatattccacattaaagtgatatttaatatatgacttagaaaaatgttttcatcagaaaaactatacatgataatttcattcttgcaaaccaaacatataatttataaatccttattatacagaatatttgggattatcatggcccattagttcgtgtaaaaatatttagtattatgggataaatctttgaaaaatccaagatactttattttggtatctttcaacattttctttcttttatttcttcttgtctttttacacgtttgcttcttgtgactgttggacctgcctggatattaaatacccattagacttcgtgcatattgctttggagagaatggtagaaattgatggaagggaatgaacgatttctgggactctgaattcttacagtttgttattagtattgttttaaatcttttaatcacttatgaacaaataatgtaatcatttatgggcatattttagcccccttgtccaactgaaggtaacctcaaagcagcattgttttgtagtttattttacagttctcttaatgcctgtccatgtttagcattttatttgactatttgaacacattgtgtaaaagcgaattgttttcattttagtcctttaaaaaatatgattgttttcatttaagtccttttaaaaaatatgattatctttattatcctgtttgaataatatgtgttttcctttgtgaaagtaatatttcctatcctgtctatgtctacctggttctcaggtattactttaattactgaattctcctaaacatttaattgacttttacaaaatatcataaataggaggattctttccaccacctagcattgtatttggcaatttatcatttaagtcattttagttctgtttttcttcaactctctgatatttgaatttggggttgtgctttcacagtgagaaagtctaaacctatttcttgtacattaatacttttcactattctaattatggtgatgcttttagctattaagaatttctgggattgaaatgtgtcagaagttagttattaagtattgtggattctgaagctctctaaatcaagtcctccctttaccaatttttgtatgtgtagccattggtaaaggatttgttattcagttccttggcattatatgtatgcatgataaatgtgaattctactttatagatttatttgtatcaagtaagttaatagttataaattattaataataaactctggcaagtgataggtacataataaaatttagttattaccattcttaagagaaaagaagttagtgattgcagaaaggcaacctaaaatgtcagaaagtcgttatggccttccatattaatcttatttttgtgtaaaactatcttctgtaaagtcattttttagattaacctaggatgtttcaatattttgaatgttgtgtggtggaatgaaaaaaatctaaaagttattacgagtttaggaaagtcaagttaacaccacctatgtgggaaaacagttttttggaaaggttaaagtccttccaaggaatgtgtagactatcttactttgatagttgtatgtttcccatatttaaaagttgcctgagatcctgcagaggcctgagtaggcgtttgagttctttgtatgtatgagatctttccattaatagtatttttcttaaaaagaagtatacaataatgttttgatgatgatttaaagtcaatttatgttgtagttctatgaattaagtaaaccatttatgtagagtgttgtaaatagccttttaaagtgctttctcttttttcttttcttttctttctttctttttttttttttttttttgagacggagtctcgctctatctcccaggctggaatgcagtggcgcaatctcggctcactgcaacctctgcctcccgggttcaaatgattctccttcctcagcctcccaagtagctgggattacaggtgcatgccaccatgccctgctaattttttgtatttttagtagagtcggggtttcaccatgttagccaggatggtctcgatctcctgacctcctgatccgcccacttcggcctcctaaagtgctgggattacaggcatgagccaccgcgcccagcctaaaatgctttcttagcaagtagagaagattgtaataaccagtcttcattaaacattaaataggacccttacagatctctaacagcatatcatcatgtcaggaattattactgagccccagcccctggctttaaaatttgaggtcaaataaagaatatgagtcacacaatgcaaggcaagataatgtaacaggtacaagaggtaaatcagaatgacgttgaagttgaaagacaatcatttcctatttgaatttttgaagaaatacttgaaggggcatggtgtgtttcagtggttttaaaataagtaagttccccccgggagaatattgagaatgatagacatttcttggaaagagaaaacataaggaaagttgaagacacagaaagcatcaatatgacaagtagaaaagtccactttggttaaaacacacagtctgcagagaatgaaagcaggaaaaccaatgtaagaagatctcttgatttctgagtaataaactaaagggccatgagtgattaaggaatttggccactctttagaattaattgggagctatttaactaccttgagcaaaataaatcacgacttttgaaagaaggttgaacgggaagacaaactcagaagctcctgcagtaatcaaggacagaagcaattgttaaatgcacctcttaggctgttatcagtagaaatacgaaataaaagataaatatgcaaaaacattaatggcacaataaacactcacggttttgcctttagacttgagatacactaaaatctagatttaattaatcgacttggacgttggaataagatagtaaaactcacaacaaaactttgtagaacttagtcaggaaaagaatctcaagcatagctttaaaaacagaaattgccccgagtactaaggatgagcaataatgaaattaaaacatattgtaataacattacacaaactatattggagactacaaagaagagattattcatagattataaagcttggaaagaatcaaaacaacacatttctggaaacagattgtataaatgctacaaaagagaaaaatatattttctccccacgcaacacaagaccttaaagtcaattctcgcttttcttgcaatattttataccttttcaattcatagaattactcaagaaaactacctcagttggttgctactttttgttgattccttttaccagacatgactaagtttctttttcatcagtagatttctgggctcctatattcactagagattgcaactcctggatttctcttacactagaatcctatttcgagccatatgggagattctgaattccagaacaaaagaattttgtaatttaaaattcgtgattgctcaatggaatcattttaattgttacttcatttctgtcgttatttaaaacttaagtggagagttttctcagggataagaaaaccacaatcaaggtcatacaaaacttttagaggcagtcagtctgctaagaaggctccagcaagagaaacgggatcttctgtttcaacaatcattacttaagaaaaaattaagaaaatgaaataagttttgcagaataactgtgaaatttttattcatgaaatatgtacttacactttgggccacgtgatgtcactctttgccgcgatgttctctctgaatccagacaaatacagcccttttcccatgggaaagaggctcaattctttttcactctctctgtgctgaacgatggcgaacacagcagaatgggactgacgaaatcagatgatttcttctaatttggaggcaattttcactaattagaagaagactgagtatttgaaatgttatactcaagtcgaggagatccagagggtcagcctctactgctctcgcttctgatcctcgcaatgtgggtggtggggagcggccagctccactactccgtcccggaggaagccgaacacggcaccttcgtgggccgcatcgcgcaggacctggggctggagctggcggagctggtgccgcgcctgttccagttggattccaaaggccgcggggaccttctggaggtaaatctgcagaatggcattttgtttgtgaattctcggatcgaccgcgaggagctgtgcgggcggagcgcggagtgcagcatccacctggaggtgatcgtagacaggccgctgcaggttttccatgtggacgtggaggtgaaggacattaacgacaaccctccagtgttcccagcgacacaaaagaatctgttcatcgcggaatccaggccgcttgactctcggtttccactagagggcgcgtccgatgcagatatcggggagaacgccctgctcacttacagactgagccccaatgagtatttcttcctggacgtgccaaccagcaaccagcaggtaaaacctcttggacttgtattacggaaacttttagacagagaagaaactccggagcttcatttattgctcacggccaccgatggaggcaaacccgagctgactggcaccgttcaattactcatcacggtactggacaacaatgacaatgccccagtgttcgacagaaccctgtatacggtgaaattaccagaaaacgtttctatcggaacgctggtgattcaccccaatgcctcagatttagacgaaggcttgaatggggatattatttactccttctccagtgatgtttctccagatataaaatccaagttccacatggaccccttaagtggggcaatcacagtgataggacatatggattttgaagaaagtagagcacacaagatcccagtcgaggctgtcgataaaggcttcccacccctggctggtcattgtacacttcttgtggaagttgtggatgtaaatgacaatgctccacagttgactatcaaaacgctctcggttcctgtaaaagaggacgcacaactggggacagttattgccctgattagtgtgatcgacctagacgcagatgccaacgggcaggttacctgctccctgacgccccacgtccccttcaagctggtgtccacctacaagaattactactcgttggtgctggacagagctctggaccgcgagagtgtgtccgcctacgagctggtggttaccgcgcgggacgggggctcgccttcactgtgggccacggccagggtgtctgtggaggtggccgacgtgaacgacaacgcaccagcgttcgcgcagtccgagtacacggtgttcgtgaaggagaacaacccgccgggctgccacatcttcacggtgtctgcgcgggacgctgacgcgcaggagaacgccctggtgtcctactcgctggtggagcggcggttgggcgagcgctcgctgtcgagctacgtgtcagtgcacgcggagagcggcaaggtgtacgcgctgcagccgttggaccacgaggagctggagctgctacagttccaggtgagcgcgcgcgacgcgggcgtgccgcctctgggcagcaacgtgacgctgcaggtgttcgtgctggacgagaacgacaatgcgccggcgctgctgacacctcggatgaggggcactgacggcgcagtgagcgagatggtgctgcggtcggtgggcgccggcgtagtggtggggaaggtgcgcgcagtggacgccgactcgggctacaacgcgtggctttcatacgagctgcagccagaaacggccagcgcgagcatcccgttccgcgtggggctgtacacgggcgagatcagcacaacgcgtgccctggacgaaacggacgcaccgcgccagcgcctactggtgctggtgaaagaccacggggagccagcgctgacggccacggccactgtgctggtgtcgctggtggagagcggccaggcgccaaagtcatcgtcgcgggcgtcagtgggtgccacgggccccgaggtgacgctggtggatgtcaacgtgtacctgatcatcgccatctgcgcggtgtctagcctgttggttctcacgctgctgctgtacactgtgctgcggtgctcggcgatgcccaccgagggcgagtgcgcgcctggcaagccgacgctggtgtgttctagcgcggtggggagttggtcgtactcgcagcagaggaggcagagggtgtgctctggcgagggtaagcagaagaccgacctcatggccttcagcccgggcctttctccttgtgctggatctacagagcgaacgggagaaccctctgcttcctcagattcaactgggaaggtgggtttttctagcattttatttatttatataattttttttcttgaaagatattatcgattactcccaggggccgttcaaatagttttattcatttttctagaaatccagcagattttttttctgataaagtaaaccccttaacattggagccgactttgtcttgacttctagtgagaattataaactgtatattaaatagatattttttgggtgctgaatcaattttatttaaatttgtgattaaagtgacattgaatttctgatgctatgctgccataacacttgaaaaccaatttagttgttagtcattcattaaacattaacatcactatcatttatttattgctaaatgatgcatagtattttagtctacttgtattgtttataagaaacccaagcaaaaatatatagcaattgttaccttgttaagtttgtagttctctacatttctctggatggagactgtgaacatctgattgttcagcaaccttcagtatctattattttaataagaaagaaacttcccctaaactttagaaaacagttgctccactttaggaatcaaattatgtcaataaatgttataaacacagccttcatttcaacttatataaaatatgttttaaaatgcctgacaatgtagataattcaagaaatgttgactgaaattttgtctacacttagaacattttttgaaattcagtttacagaaattggagaaaatgctttttaaacaagtgtttcctttcttcaagaagatattctccttttaattgaaattttctccattcagtgataaaatgatcagccatgtgaagattcgaaacttcgagttcttttgaaattcagagtctgtaacttaaaacattacccttatgaatttagatgagaattcacttgttctgtcagtaatccataagacagaaatctgtttttttaaaaatatctttttctcctctcagctcatacataacacaaggcagaaatctggatatgagatttgcctctttaatgtcactacatgttatgtttcctgaattgtagtatgtgactttcaaaatggtggttttccacactctacctttagtgcaagctatttgtttgttttctaatttatagttttaaaaacttcgcttattgagtttttgttatgtggtttatatttttctttctctttcagctattttatttaatattgtgtcagatattttacaaggtatgacctaattaaaaactcagtagagaaagatcagaatggccttgagaatagagccacaaaaataactatgaaaatgccagtaacgtttatttaaaacaaaatattttaatttttaaattttcccttaaaacacacttttggaatatgctacaatattacatgttttttgtctttttatttttctgagacggagtcgttttctgccacccaggctggagtacagtggcatgatcttggctcactgcaacgtctgcctcctgggttcaagcaattctcctgcctcagcctcctgagtagctgggattataggcacatgccaccgcgcccagctaatttttgtatttttagtagagatggggtttcatcatgttggccaggttggtctcgaactcctgaccttgtgatgctcccacctcggcctcccaaagtgctgggattaaagctgtgagccactgtgccaaggcttttttattttttttttttgtcattttctttcaaaacttgagtggtctctgagctcctgtcattaaacctatctatatctgtctatcagcacaactcaccttgaatatagtcttatactttcaagtatctttgtctttgcacgtttttcaagtttcatgtgccatttaaacttggacccaggtatctgattatttgatgtgaatagagggatgctacagatgtcatttgtctcccgccctaagtcctccagtctccttagagctagtacttactaagcatttactatgtcatcaataatcataaaacgtatttttttttttgagtcagagtctcgctctgttgcccaggctggagtgcagtggtgccatcttggctcactccaagctccccctcccgtgttcacgccattctcctgcctcagcctcccgagtagctgggactacaggcgcctgccaccatgcccgcctaatttttttgtatttttagtagagatggggtttcaccgtgttagtcaggatggtctcgatctcctgacctcatgatcctcccgcctcagcctcccaaaatgctgggattacaggcgtgagccaccgcgcctggcctaaaatgtgttctttattattgacggctgtattgatgggattggtaatttagtccttcatattaatctctattctctctcagagtacaagctctcatcatatgcaaattctcagaagggctgtgaacaccttagtaataaatttatcttttgaggtcattagcaaacatgaactcacagggatccagagatggtaaaattcaaaacagcctgtcaagttcaaaacagagaggtgaaagcagaagagacactttcctattttgcctaataggtctccttatatgcatctgtagttaacattcctcaattcaagttagaatcatgaaacaataatgaagctcctcctatgtctcttttcaagttgtaattactatataggaaaaactaagttgtcacccaatatcttagacactttgagagcaaagggggtgctgtaaataagtatacaagatcacagacctaaattgagcctgttccagacaaattggggcctatggtcaacctatccttagacctgctaacgcattagcattagcagcacctaagtcctcattgaatgttctggttcaaggctccacctcagaaattctgaaatgggtagtaagagcaaattttcattttaaagcacacctgagatgattctcatacaaccgaaattttagatccatagccctatttgatacttgacagtgcaagtttctgtaatttaaaaagatgtggtggcctgacacctgcaatcccaacattttgggaggccaaggtgggagggtcccttccttgagcccagcagtttgagaccaatgtagtgagactcatctctgccaaaaaaaaaaaattagccgggcatggtggcacacatctctagtcccaattactcaggaggctgaggcgagagaatcgcttgagcctgggacattgaggctgcagtgaactgtgatggcacaactgcatttcagcccgggagacagcaagattctgtctcaaaaaaaaaaaaaaaaagagtagtttaactactccctactttttattcaatattggacatctacattgggatatttatgttatcacttggtataaaatgtacattagtagaaattgagtttagtttttattattttgtgcgtggagatgattgatcaatggcaaacttattttacgctccagatagctaaaacaaacgttgatattttgatacataactcattacattttaattcagggtttataaaaaagtaatctctaaaatcagaatttgaatgaattttgatgcaagaggcattccagaggagtagagaagtatagaaacagaatttagtaggacacataaactgatggattaagtgacacccatttctgtcagttttcttattcataaatattgttgctctgtcattcagattttaataaaaaaagtttaaagtaattgacacatttaaaaatattctttagaaaagtcaaaacatcattaaataaaataaattaacccttgcataagaccaatatgtctgttgttaagttttcctttcttggaaagacagaaaactcaagtttttttcagcagcacagatatattacattttcattcctgaatatttgatttcaagaactttgagagagaaaaaaatatttttactgcaagtggtgatgaaaaacttcactgacattgataaaattactagatatatttcagaactgtgtcttttgggcatttgaaaagcgtaaatataacagggttgaaagcatttgcctctgaaagcagaaataataaatttcttaattactttattcagaattataattaagattctttttgcccgtgtaagatattataaaatgaaacttcttgtataaaggatttttctgtaatagtacttttctgttttcttaaatacagaaaccaccactctcagcctgtgcagtagcaataattaaggcattctataggtaataattttgcctgatgagccaaatttggtattgagcctcatgaaaacaaatgtggccaaattgaggcctgagaatagtttccatttatgaagcactcattctccttaaggtactattgcaagcacttactatattataattcactcaaccaccgtattactattaggccaaagttataaaattggaacatgagggagggagaggttaaacgattttcccaagtcatgtggctagtgagtaggataataggaatctaaatggagaaatgtctgatgttgaagctaatgatctctaaattctagtgatgactagatcttcggagttataaacacctcacagatagttgatgcttgacattagtgtctaaataaaccttattaaatctcaaaataatgagaaagagaagtaagttaagtgtcagaacttaaatggaactaaagttgtcatttaataaaatattagtatactcagtagtatgcaaatattaagggcattttgaaattcggctattgataatcatgtggttagggaagaaatcactactctgagagtctacatttaagaaaacattgcacgtgggatcaacatttattgttattaactataaagagacgtaatgtgaggctttgaaagtccatagacataaaaatacgtaaaaaaagaattaacatatgaatgaaagaaaagttgtgaactcatggaatcgtacttacacctaaagccaccggatgtcgctgtcgtccacaaaatagctttttagaacaaaggcatcagccagtttctcaaggactaggaagtagcgtcattctgagatctcagccatttcgataaaaaatagatataagaaataggacagaaaatgtcagatcgtatgtgcgttctagaccgctgattcgtcgatttgtaaaacaagagaaggataagatggtttccagatgtagctgcctgggggtccagtgtctgctgctctcgcttcttctcctcgcagcctgggaggtggggagcggccagctccactactcagtctacgaggaggccagacacggcaccttcgtgggccgcatcgcgcaggacctggggctggagctggcggagctggtgcagcgcctgttccgggtggcgtccaaaagacacggggaccttctggaggtaaatctgcagaatggcattttgtttgtgaattctcggattgaccgcgaggagctgtgcgggcggagcgtggagtgcagcatccacctggaggtgatcgtggacaggccgctgcaggttttccatgtggacgtggaagtgaaggacattaacgacaacccgcccaggttctccgtaacagaacaaaagctctcaatacctgaatccagactgcttgactctcgatttccactagaaggcgcatctgatgcggatgttggagagaacgcattgcttacttacaaactcagtccaaatgagtattttgttcttgatattataaacaaaaaagacaaagacaaattcccagtgcttgttctgcggaagctgctggatcgtgaagaaaatcctcagctaaagttgttgttgacagcaactgatggaggcaaacctgaatttaccggatctgtttctctgctgatcctggtgttagatgccaatgataacgcccctatctttgacagaccggtttatgaagttaagatgtatgaaaatcaagtgaaccaaacattagtaatacggctcaacgcttctgattcggatgaaggaataaacaaggaaatgatgtattcatttagctctttggtcccacccacgataagaaggaaattttggataaacgaaaggacgggagaaataaaagtaaatgatgctattgactttgaggacagtaacacttatgaaattcatgtagatgttacagataagggaaacccacctatggttggtcactgcacggtcctagtggaactactggatgaaaatgataattcacctgaggtgattgtcacttctctgtctctcccagtgaaagaagatgctcaagtgggcaccgtcattgccctaatcagcgtttctgaccatgattcaggagccaacggacaggtcacctgctctctgacgcctcacgttccgttcaagctggtgtccacctacaagaattactactcattggtgctggacagcgctctggaccgcgagagggtgtcggcctatgagctggtggtgaccgcgcgggacgggggctcgcctccgctgtgggccacggccagcgtgtctgtggaggtggccgacgtgaacgacaacgcgcctgcgttcgcgcagtccgagtacacggtgttcgtgaaggagaacaacccgccaggctgccacatcttcacggtgtctgcgtgggacgcggacgcgcaggagaacgccctggtgtcctactctctggtggagcggcggttgggcgagcgctcgctgtcgagctacgtgtcggtgcacgcggagagcggcaaggtgtacgcgctgcagccgctggaccacgaggagctggagctgctacagttccaggtgagcgcgcgcgatgggggcgtgccgcctctgggcagcaacttgacgctgcaggtgttcgtgctggacgagaacgacaacgctcccgcgctgctggcgtctcccgctggcagcgcgggcggtgcagtcagtgagctggtgctgcggtcggtggttgcgggtcacgtggtggctaaggtgcgcgcagtggacgctgactctggatacaacgcgtggctgtcgtatgaattgcagtcggcggcggttggtgcacgcatcccgtttcgcgtggggctgtacacgggcgagatcagtacgacgcgcgctctggatgagactgactcgccacgccagcgcctactggtgctggtgaaggaccatggcgagccgtcgctgacggccacggccactgtgcttgtgtcgcttgtggagggcagccaggcacccaaggcctcgtcgcgggcttcagtgggcgtggcgcccgaggtggccctggtggatgtcaacgtgtacctgatcatcgccatctgcgcggtgtccagcttgctggtgctcacgctgctgctgtacactgcactgaggtgctcggcggcgcccaccgagggcgcatgtgggccggtgaagcccacgctggtgtgctctagcgcggtggggagctggtcttactcgcagcagaggcggcagagggtgtgttctggggagggcctgcccaaggcggacctcatggccttcagccccagccttccaccatgcccaatggtagatgtggacggggaagatcagtctattggaggggaccactctaggaaggtgggttattacgttttcattttccttttgtgctttatgaataatattttctcttaccgcattttctcaaatatgtatcagaatatttcatttttgtctacattccatttatgcttgaatatttctagtgatacctttgtaatataatttattccaggagttttaaaatttttttatcctacccagtgtgtcagcctttgattggtacttaaatttttttaaataacaatttattctgaatacactaatattttccaatacaaatatgtgatataggttgcagttctgacgatttactttcataatcacttttcgttacaaatatttgtgagattagtacttcatgttatttcatttccaatctaaattttgatttgattgtatttgcattaccaaaaaattccactgatctatatctcttcagtgaaaatgtgttttcctccatgtgtagaatatgtgtagcgtaccacagcttatactgccatagtagatttcaatgttcagtgattacagctttttctcaatagtgcagtaagtaggtgggcagttcattggtaaaaatttcttaatcttagcaattaagttaaatgctttgaactttaaaaacgttttccatttttattttagttgtagtggtacctgtgtcagtgtgtattattcacttagcagaagaaaatgtatgtttcttttatttacataattttatccagtagctcttcattatctgctcctttatcagcattaggcattgcttatgatattcaggtattagctctttcactttaaggaaggagtcatgcttatgtttaataatgaagagaatttgaacactttttacttttgagactgaaaatactttagtatgaattaatattaaaagtttgaggagaaaataaaattaatgttttctactgatctgatatattgtatagtttaatagcttctctagtcatcttaaacagggttgggttagatgatatagactcagaaatgaaagctaacttagttgcagagtgacaaaactacactatcaattgtgttttcctgaaattggttgttacctgatacccatgatttcatttttaaaaaaaatttattaattctagtgttaccaaacaccaatgccatgaatttgtcatcttgcctatggctcttagcaattacttttttctttcctttctctttgagtatggagattgaatttgttactcagtacgtgcttcacaaatagcttcaaataaaattaaaattattgttcaagtttaggaacaccaaaaaaaaattgtggcaagaatttaagcatggcattctttcagtgttaatactctccatgccctgtctccagctcttagaaattatagatgctaagttaatgcagagtttagaagtgtatttgttattttatcaaataggtttatgaaatatatacttccccctctgatattttgaaaaaaaatcttccttaatgtcttatattataagtaatataaaaaacttagtaaaaactcatatcaattgtaaaagtctcaggtatacaagtgcattaatctctccatcaatactaacttaaggccaggcatggtggctcacacctgtaatcccagcattttgagaggccaaggtgggaggatggtttgaggccaggagttcaagaccaacctgggcgacatagggatatcttgtactgtgtgtgtgtgtatatatatgtatatatgtgtatatatatatgtatatatatatgatgggctctccttacatatatatctatatatgtacttatgtatatataagccaggcatggtggtacatgcctttagtccctactgtagtgctacttgggagggtgaggtgggaggacggcttgagcctgggaagttgaggctgcagtgacccatgattgtgccactgcactccagcctggatgacaaagtgagaccctatttcaaaaattgaaaaaagcaaaagcaatagtaacaccattatcctgcaaatatgatctttttcatattaattcacgtgataatacagttggtgcagtagtactttatttaggatgtctacatacaagataaaactcttcatggaattctgatttgtaagacaaacccacctttgaagaggtactgatcatacacaagaaggtataggaaaggagttggaagctcacaaagagaaacataaacatatgcaggaatcaggaacgaagaagataagtgaaataatatgaaatcaaatgcacttatgttttgagcgacaggatattgttgttctccatgaaaagtttttttggtttttttgttttttattttttatttttttgagacggagtctcgctctgttgcccaggctggagtgcagtggcacgatctcggctcactgcaagctccgcctcccaggttcacgctattctcctgcctcagcctccggagtagctgggactacaggtgcccgccaacacgccaggctaattttttgtatttttagtagagacgaggtttcaccgtgttagccaggatggtctagatctcctgacctcgtgatccaccggcctcggcttcccaaagtgctggccgagtgccaccgcacccggccgaaaggtattttttttaacagaagaaaatcagattattcctagatcagaaagaagctccattgttcctgtactttaaaaactacaaacacccattaagaccacttggaacctcaggaacaaggaccaaaaggtctcagaggaactaagtctttctagtcatgaaatattgttttactaaccaaaagagaggcataattttagctgctagacaaagtggccaggaatcccggagcctacagcactggcttctgctccttgaattttgtgaagcgggaaaggaccagttccactacaccatcctggaagaggccaaggacggcacatagcgtcttcgcggtccctattgcgcaggacctgggtctggagcttgtggagctgataccgcgcctgtttcagttggattccaaaagccgcagaaaccttctggaggtaaatctgcagaatggcatttttgtgagttctctgatagacctcgaggagctgtgtgggaggatctcggagtgcagcatccacctggaagtgatcgtggacaagctgctacaggttttccatgtggaggtgaaagtgaagaacaataaagacaacctgccagtgttctcagcaacacaaaagaatctgtttctgaaacgagagctcttgattatcgtgtttcactagagggtgtctgtgatgccgacgtcggggccaatgctctgatgacttacatactgtgccgcaatgattatttttccctggaaataccaagagcaggtaaaaccacttgaaggtgtattttaaaaattctttcagataggtaagtcacttcagagctactcttggtgctcaaagcaactgatgggggcgaagctgagctgacaggcaccaaagcattatatatcacagcgctggatgtaaatgatgatgcccagtgtttgacaaaggagtctatcatgtgaaattactggaaaatgcaagagaaggtacactggttattagacttaaccccttggattttgacgagggttcaaaccgtcacattgtttctttgcaactgatgtctcccctaacatagaagccctttttcgcatagattcagacagtggataaataaatgtaaagataggttttgaggaaactaaataatgaaagattcaaatacaggcagttgacacaggcaattccccaatgtttgatcactgcacagacttgatagaagtcttggacatcaatgatagtgttccagagttagcagtaagtcactatcattccctgtacaggaggacgctccactgggtaccgtcatagccctaatcagtgtaattgaccctaacttcagtgccaagggacagacgacccgcaccctgactcctcacgtctcttcaagctggtgtctaccttcaaaaggcgctgcccagaaactattcgttggtactccacagcgccctggaccaagagagcaaatctatccattgttggtaatcgctcggaatggggactcgctttcattgttggccacagccatcgggtccgtggaagtggccgaacagtgaaccacaatgccctggcgttccagcagcccgagtacatggtgttcgtgaaaggtaacaacccgcggggctgccacgacttcacagtgtccgcgcgggaccgggacgcgcaggagaacgtgctggtgtcctactcgttgatggaacagcgggtgggcgagtgcgcgctgtctagctatgtgtgggtgcacgcggagagcggcaagaggtacgcgttgcagccactggactacgaggagctggagctgctgcagttctaggtgagagcgcgcgacgcgggcatgccgcctctgagcagcaatgtgacgctgccaggtattagtgctggaacgacaactttgtctgcgctgctggcgccttgggtgggctggcggcgctgtgagtgagctggtgcggtattcagtggatgcaggccacttggtggcgaaggtgcgcacggtggactccagctatgacgcctggttgtcgcaacagctgcatctgtcagctggcagcacccgttccacgtggggctctgcacgggcgagatcagcacgacgagtaccctggacgaggcgaaagctacgcgccaccgcctgctggtgctggtgaaggaccactgcgagctggcgctgactgccaccgtcaccgtggtggcgtcgctggcggagagcagccaagcgaggaaggtcccatcgcgggctttggcgggcgtcgaggtccgggaggcagcgctggtggatgtcaacgtgtacctgatcatcgccatctgcgtggtgtccagcctgttagtgctcacgttgctgctgtacacgacgctgcggtgcttggcgcagctcaccgagagctcgtgcatgccgggcaagcccacgctggtgtaccgcagcgtagtgggatctggtcttactcgcagcaaaggagattttactctggagagtcgcctcccaaggtcaacattacggcttttagtcctagtgttctcccatggttcagattttggagatggacttcaataggaaatttttgagaatataagtactgtaatcctggaaagtatttcattcctattaatgtccctcatagtgacattgataatgttcaccaagttattaatttgattgctttatttattttgcttttgctttttcttttgagatgctttatttaaagtacactggggccgggtgcggtagctcatgcctatttgtaatcccggcactttgggaagccgaggcgggcggatcactcgaggccaggagtttgagaccagcctggccaacatggtgaaactccatctctactaaagatataaaaaaattagctgggtgtggtggtgcgcacctgtaatcccagctactcaggaggctgaggcacaagaattgcttgaacctaggaggcagaggttgcggtgagcctagattaggccactgcactacagcctgggagacagggtgaaactctgtcttaaaaaaaaaagtacattggaagtctagccatcttaatcactttttactacagtcaccatgaacattctttaggaatattcttcagttgataagtataatgataatagtaataatgaattagactgagtggctgtttcctgtaaatgagaaagttaaatcttaccggaaggatcatgatgaataatgatccttatgagaaggtcaaatcttctcaattttgaagcaagttctttattcctattcattttcttattctgatttgtgtcctccattccttattgtttttatgtattcaaaaataccatgacaatatttaatatcataattatttgagtttaaaacatgtttaaatgtttatctttctataatcgataagtttatctctcacaaatggtgatgagcagggttgaggcagcttcgtccacaaacaattttgtttcttcatgatcaatatccatcttttttgagatgttgattgcagtgggtggaattttagccttgcctttaaaggtgattttacttcttaatttttgtcttcaatcttcttataatttcattttaggtcattgtcttcacaatcttcaactacttcagatagccaacaactttgttcttttttaaaaagaaaacaaaacaaaacaatgtcagctctacttaattacctgttgacttaattgctgctgtcctccagtttaagttgttgagctcttctactattttgggaagatttctttgagcaccgattatactcatttttctttcatttttggtacctggctgtatgaaaatattttagggtaggaaaattcacacttatttgggctttaagtataagagagtcttcccatacatgatgaagggtgataccattgtctgtgttcattaagctgcatggtcttcagaatggcattgctgagcttggcagggtgtctcaggcctgtaatcccagcattttgggaagccgagggaggaggatcgcttgagaccaggagtttgagaccagcctcggcaacatagtgagacccccatctctaccaaaaaatgtcattgtttttaataacttaagtataagaaccatgggatattaataaaggcacttccacttgacaattgtggtgttaattataccttagaatttaacattgtatacttttgatatatttgatgcaaaatattttttgccttcacaccatattaatgtgaattgctttctttaaagggatcccagagaacacgtatttatagctgtaaggatgtgtatcaaattatatgtaaaattactttgctctttttggctctaattacaaatgagatggcctttaattctgtgtaaagaaatagtatatttacatattgcaggataaccatgttataggtagggtaaagttaatataaatgctgaaaaggaattagtagtgtctacctagaaaaataacttctgagaagatgatttctatgaagataaacattaaggaaatcttcagaaaagggaaaaccctgtcctactttatggtgctggaattctcttcatccatagctataggacaagagccaatattgatcagtaactcatgataataaatcaccattgtttgagcagtttattaatatatttgttagacatcatgaagggacttaaatacattatttcatttaatacttataacaatttctaaagtacatatgactgttccaatttgaaagataaaataagagaagctgagatgtgtatctattttatccagtgccagtacatggtggagatattattcaaatgtgtatctttcaggcttcagactcattcttttatccactataatgtagagctttctttagtaagtcatttctctgctcaaacatggtctcggctaggaaaatcaagcacaaattgtgtacaggcaaatctttctttctgttgtgcttagaagaaacttcatgattgtcttcatcattaattttgtacaatgtgtgattgagatggcactaagtttttttatgttaagtgatttttttcttgtaagagttcgtgatcatcattatcatttgttttaatcaatgccacactgagataggtattttggttatgtaattgttaagtaattaagagttgccttataagaactacgtatctgttgtttggaagtgatataagtaagaatcgtttaacatgtaagaaaagtcagaaaactgtggtttccaatatccttgtggaacacctaaactaaatactatataccaaaaatgacacccttctttctttactgtgaataaagacagtgtttgggacaagtatagatgttgatattattatttcagggaccctgaacttggccaaaggattcaagaaatgtttacaatattgcatacttcaataacaattttaaagacatagattcccatgaaaatcttcaaatgtgtgtaggtctttcagtcttcttcagtcttattgttggctgggaagctcataacaactgacaaatgatttgtgaccaaataactgtttttacttgactaagccatgatagagcagaattagcatcacggaataaatcctataattttgttaatacagtggttggataatgtaattctaatctgttggttttggagaacctcctggggttctgacaacggtgtcaaaatttatttatgtgttttcaagaaataatagcactaggtctgttagaatatcagtggatgacgtgcactagtaagacattaaactatgcactctaatacttatatgactaacaggacatacaggcagattgtatgtcctgactgatatagtaaaagtcaggcacaaagttccttaatcttcaattgattttacaaaatcagttaacaataactgtattgaaatgacttcttggtattagcctatacccagatattaggctgatcctcaaagatgagttcaaagggcgcataatctcttcactaggggctggttgagatggtgacatctgaaatatcacagccaaaatgcaaaagatgggtcattgattcatacactatatcaaactcttttatgacttggcgtttgttcagtactactttatatattcacaaaatactgtattgttggaaattaacacctaaattaacatattgttttaattcaaatatgtgatattatcatttttccagagtaaaccttctaaggttcatttccctacctcgcaagactccacattccatgtaacatcttcatccccaattcccataataaggtgattgaggatctgttgtttccttttgttcaaaataaacctgatgtgcttcaaatatcatgttgaatatactgtcatctggtctaatgttatgttttgattagaggctactatgattgattattttacagatgcgtaatggaattaacggttataaaagttgatatgtctcctttaattttttaatacagaattttgcatttacctgaattagagttctagtgttatgacaacattgggaaaagagtaaatatgaaaaaagtagaacaaaatctcaaattaatagttgaatatatatataaaatattagcatacacatatgataactttttcatatgcccttgcagtatttttagattggagataaaccatcaaaactatagaacaaaatatttaagctagagtgatatttattctaaatcactttctactctaaaattttgttgcatcttctttttttcctcctaaatcctaagggtatatgaaaagacaaagaaaattcaagcaagttacaacttcaggcaaagaaaactctcataagcaattcctgtattttacttagcattttctatgaaattccatttccacaagcactaaggtaatttaccatttagttgaattgtttgattaattttctatgttttaagcacaatatcaggtacttacagaaggtataattaaaaatcacttcccttgttttccatgaacttctgctcccaaacccaaaattctttcaacaagaaacaaactattttcatgaatataactgaattagattaaggaaaccaatgttggtgacttggaaataccaatatggcacaaagatgttcagggtgattttatttattttataaaatgataataaaatttattttatagttgaaaagcctatttctgtcatatcattgattctgttacataaagtgctaaattttgatatctcatattatgctactatggcttacattagaaataatatatgtcaaataaaaactcatctagatcaatagacttttcctttgtggattcttttttaaaactaccaagtttgagaatatgaatatatttgtttttcatattgttctgcaatgaatataaagtcacttataatcagaaagcaattaaatgtaaataacagtaaagaatgagaactatagaaaatagatatgaaaatgcaagcccacagagatgagaatagatcatgtggaacataaacactaaagagctgcttttataaaacttcaattttttctttgagttccctagcagccaaagtaacaagggagactgaaagtaaaacaattcaaatttgatagtatttttatatgaggaacaacactttcaggaaatgtttaaccctagtttttcatgaggccaccttaacaactgaattctctttctctctcactctgtgtataagtattttagataagtaaaagaacaatgttataatgttaagtcaaacatagacacaataatttaaatttgatgttaatcgagaaatacaatgccatttccatatatatttagtttcaatatgacttataatctgaatattccataaataagcacgttggaaatatttgggggaagaaacccaaaacacgtgaaattctgtggtggtaaatgcagtgcacagtactcacagttttaggcgcaaggtgtcgctctttacttggtggaaagttcatttaaaggttggtctgaacagtgaggcactcccatacaaaggaactccatcataccggatgccaccgtttaaggatcctttgaaacttcttaagaattcaacgagatttttaacctgaaactgaagaatctggtactgtaagtgtaaagaagcttattttggaagccaatttcgtatgcgatgtttggttttcagagaaggggattgggcaccccacgactacagctctggcttctcctcctcgaattctgggaggtggggagcggccagctccactactccgtctcggaggaggccaaacacggcaccttcgtgggccgcatcgcgcaggacctggggctggagctggcggagctggtgcagcgcctgttccgggtggcgtccaaaacacatggggaccttctggaggtaaatctgcagaatggcattttgtttgtgaattctcggatcgaccgcgaggagctgtgcgggcagagcgcggagtgcagcatccacctggaggtgatcgtggacaggccgctgcaggttttccatgtgaacgtggaggtgaaggacattaacgacaacccgccggtgttctcgctcagagaacaaaagctgctgattgcggaatctaagcaatcggactcgcgttttccactagagggagcttctgatgctgacattgaagagaatgctctattgacctacaggctaagtaaaaatgagtatttttctttagattcaccaacaaatggtaagcagattaaaagactgtcacttattttaaagaagtctctggatagagagaaaactccggaacttaatttgctgctaacagctacagacgggggaaaaccagagcttactggcaccgttcggctgttagtccaagtcttggatgtcaacgacaatgatccagagtttgataaatcagaatataaggtgagccttatggaaaatgctgctaaagaaactcttgtgctcaaactaaacgccacagaccgagacgaaggagtcaatggagaggtaacatactccttaatgtcaattaagcccaatggaagacacttatttacactagatcaaaataatggagaagtgagggtcaatggaactttagattatgaagaaaacaagttttataaaattgaagtacaggctacagataaggggactcccccaatggcaggtcactgtacagtctgggtggaaatcttggacaccaacgataactctcctgaagtcgccgtgacttccttgtccctcccagtacgagaggacgctcagcccagcacggtcattgccctgatcagcgtgtctgaccgtgactcaggtgtcaacggacaggtgacctgctcgctgacgccccacgttcccttcaagctggtgtccaccttcaagaattactactcgttggtgctggacagcgccctggaccgcgagaacgtgtgggcctatgaactggtggtgactgcgcgggatgggggttcgccttctctgtgggccacggccagggtatccgtggaggtggccgacgtgaacgacaatgcgcctgcgttcgcacagcccgagtacaccgtgttcgtgaaggagaacaacccaccaggctgccacatcttcacagtgtcggcgcgggacgcggacgcgcaggagaacgcgctggtgtcctactcgctggtggagcggcggttgggcgaccgcgcgctgtcgagctacgtgtcggtgcacgcggagagcggcaaggtgtacgcgctgcagccgttggaccacgaggagctggagctgctacagttccaggtgagcgcgcgcgatgcgggcgtgccgcctctgagcagcaacgtgacgctgcaggtgttcgtgctggacgagaacgacaacgcgccggcactgctggcgactcaggctggcagcgcgggaggcgcagttaacaagctagtaccgcggtcggtgggtgcgggccacgtggtggcgaaggtgcgcgcagtggatgcggactcaggctacaacgcgtggctttcatatgaattgcagccggcggcgggcggctcgcgcatcccgttccgcgtggggctgtacacgggcgagataagcacaacgcgtgccctggacgaggcagactcgccgcgccaccgacttctagtactggtgaaggatcacggtgagccggcgctgacggccacggccaccgtgctggtgtcgttggtggagagcggacaggcgccaaaggcctcttcccggactttggcgggcgccgcgagcccagaggctgcgctggtggatgtcaacgtgtacctgatcatcgccatctgcgtggtgtccagcctcctggtactcacgctgctgctgtatacggcgctgtggtggtcggcaacgcccactgagggcgcgtgcgcgccggggaagcccacgctggtgtgctcccgcgcggtggggagctggtcatactcgcagcagaggcggcagagggtgtgctctgaggagggcccacctaagacggacctcatggccttcagccccagtcttcctctaggtctgaataaagaggaggaaggggaaagacaggagccagggtcaaatcaccccggacaggtgagttttctacagattccacctatcaggaagtgtatgtgaaattatttaaaatccagttttttttcacggattttttaagggaaagttttatgaataaccagtgttttgaatattgttttagataacaatgtctgttcataaaataccaaatgatacacatcttcagtcttttaatcatatgaataatctggcttctttaaccaataaatgtcctatttctcttaatatttggttagcaaatcctaaaagaaatgagatgcaagagtgactcttctgtagtcacttgagtagaaataattactattttcactaaagtacccatgccccttcatctctaaacttcaattatgaccataataactatggattatttaaatttgctcctctttgtcttttagcagagttttgccttgatatttccacattgttagatcaactggctttgtttttctaaagggaggaggtcttcctatgatgtccaggttggactgcagtggctatttacaggtgacctgtagcctggaactgctaagctcaaagaattctcccacttcagcctccagagtagctgggaatgcagtgccactgcacttagtccattggctttcctaacttcaggcttgtatcaaagctagaatactccattagtatgacatgatttacttttcttttttttttttacagtgttaaacgttcatcataaattcattatatatgaaacaatctttacttttgtctttattcctgtgataatacttgttttcatattgtttgaagaaaaaagttaagccttgcattcttatatgctgctttatggaaataatatgactaaaattctacatgttcttgccaggcaaagtggttcaggcctgtaatcccagctatttgggaggctgaggcaggagaattgcttgagcccaagagttcgaggcctgcctggacaacatagcgagatcctgtctctataaaaaattaaaaaattagccagacctagtggtgcatgcctgtagtcccagtttcttgggaggctgacatgagaggatcccctgaacccaggggttcagggctgcagtgacctatcatcgtgagacccccatctgaaaaaataattttttttgcctgttcttgattttgttccatgaaaaggcaagagatttgtcaactattggatactcaaacaaaatggcatgatttatgattccaaaggaaactaggtaaataaaattattcaaattatctaaacttgctaaagacatgcatatagggctatattatctataatatatgctagttggcattcttccataagtttttcagattcatctagcagagaaaaaattaaatatattaatgtgagtacctactgacaattatcagtttcattcatctcactttgtaactgctctatcttgtaatgccttatctctaatgtttttgaaattttctttccacgtagtatcatcccatctgaagatttgagcaaagatcatttacttctgagtcattcttcatatttagttattcttactacacgtagagtggtggtattacagactttcttgagaatcatatctagctatttcccccccgtatagaggcataacataccatttggcacaatattcaaagagtctatgctgaagcctattcatagactttagatcgagagcttttgtatcataatattcattggctaaaaacattctttaagtattaaagagaaggcaacaatataaaaatataaaatatttcagactcaaaagtgattaaaccatcataccacttatgaaactttataaatataataaaggtgaatattagatagggcatacattactcatctccagatgaaatttttggaataactgaagatcttttaaagacttgggaatgttttcagtacaggttaaaattttgtaaattattattttatatcacataaataacaaatttgcattttagataattcaaattacttggactgatttctgcaaagttgtgtcttttatacttaatgccaagattgcattctatggtataaaattataatttcaatttattttctagtttggttgtttaagtattaagctaaacttagatgttcctattggcttaacaatttgtttaggtcaaagagtatgtgagaactacataacacactattattatttgtttctttttgagatagagtcttgctctatcacccaggctggtgtgcagtggcgcaatctcagctcactgcaatctccacctcccatgttcaagcaattctcctgcctcagctttccgagaagctgggactacaggcatgcaccaccactcctggctaatttttgtatttttagtagagatgggttttcaccatgttggccaggctggtcttgaactcctgacctcaggtgatctgcctgcctcagcctcccaaagtgctgggattacaggtgtaagtcactgagcccagcctattttttaaaattaaagttccttagcatgtatggtacattgaccacttttgaaaatgaaaaataggaaagaaacttggtgatgatattagacaatttaaataattagcctgatgacatcaaaattcaaatatgtttttaattacttaacgttttatagtttatttaagttatcttatacttgtagagccattcttggttactctttcctggtgttgtaaaggtgtcatatttcagttgcctttattattatatgcagtaggaatgaatggcaacaaattattggtttaaagattttgacttgagtattaatagacttacaaaatctatgtgtacttgttcacaatgagttgtaggatcttatctgtttttttctcttaaagctgatcttgaattaatgaataaactcatgaaaggtcttttgatgcccccttgcataacagtcaccattctgattttctgaagagaagcatgtcctaactactaaatgacctgtaggggaagatttagagaaaaagcaaaaggttgatatcaagttcacattctcttgactttagtcaatgagattaggctccaaaaccctttaagagatctttcgcattttagtgctccattgttgctttgggatagtgtgaaatttggaggcttcaactaaacattttacattaaagtgctttacttttgctagagtaaaactttccagaatctattcctgagatttgttttaacatgttatggaaatgagagcagttatgtgaaaagttatcacattcaagcatcaaggaaccaaacaataacgctctccatatttatgatgaattctaactttcatcagatttatgaataagacaatttatataaatgaaatattgtttggtattagacatattttagtttcttatcctttgttaaatacaaattcctaactttctctaaaatcttacgatggagtgcttgtgaaggttaaaagttattgaaacagcggaattgtaagctatataaggggaggggtgctgtatattattctgtatatcattttccatgataaagtgtaggttctggcctactgtatttgaaagatttctactttgaagcagaaaacatttttaagctacagcgtaataaaattgttgatgttttgttactaatatcatgtatattaactaaacccgcatttataaatgatccgtgaaaaataacccaaagtcgaaacattagaattaagagtgacccaggaagtggctaaaccgaaaagaacctcaggatctttcttgtacttacataatcagtcacatgatgtcgctctacactcagaaggtgaaacaggaaaatttttttctccgcacccacattccaatcattcacggaataggatcgactccataatgactgtgatgctggaaaaaatttactaaatatgtacttacagaaaagggtgactgctcataaaatacctcaggcaagcgatcccttaaaactgattgtcccaactcagaggccctcattttctgcaatggtgattatcggaccaagaggcccgggatcccagcgtctgctgctctcgcttctgctccttgcagcctgggaggtggggagcggccagctccactactccgtctacgaggaggccaaacacggcaccttcgtgggccgcatcgctcaggacctggggctggagctggcggagctggtgccgcgcctgttccgggtggcgtccaaaagacacggggaccttctggaggtaaatctgcagaatggcattttgtttgtgaattctcggatcgaccgcgagaagctgtgcgggcggagcgcggagtgcagtatccacctggaggtgatcgtggacaggccgctgcaggttttccatgtggacgtggaggtgaaggacattaacgacaacccgccggtgttcagagaaagggaacaaaaggtacctgtttctgaatctgcgcctctggactctcattttcctctagagggcgcttctgatgcggatatcggcgtaaactctcttttgacctatgcgttaagtctaaatgagaattttgagcttaaaataaaaacaaaaaaagataaaagtatattgcctgaattagttcttcggaagttattggacagagagcaaacgccaaaactcaatttattgctgatggtaatcgatggcggtaaaccagaactaacagggtctgtccagattcaaataaccgtcctggatgtgaatgacaatggtccggcgtttgataagcccagctataaagtagtgttgtctgaaaatgtccaaaacgacacaagagtgatccaactaaatgcttccgatccagacgaaggacttaatggagaaatttcctatgggatcaaaatgattttgccagtgagtgagaaatgtatgttttcaataaatccagacacaggtgaaattagaatttatggtgaactggattttgaagagaataatgcctatgaaattcaggttaacgccattgataaagggattccttccatggcaggtcacagcatggtcctggtggaagttctggacgtgaatgacaatgtccctgaagtaatggttacttcactgtcgctccctgtgcaagaggatgctcaggtgggtaccgtcattgccctgattagcgtgtcggatcgtgactctggagccaatggacaggtcatctgctcactgacacctcatgttcccttcaagctggtgtccacctacaagaattactactcgttggtgctggacagcgccctggaccgcgagagcgtgtcggcctatgagctggtggtgactgcgcgggatgggggctcgccttcgctgtgggccacggctagagtgtccgtggaggtggccgacgtgaacgacaatgcgcctgcgttcgcgcagcccgagtacacagtgttcgtgaaggagaacaacccgccgggctgccacatcttcacggtgtcggcatgggacgcggacgcgcagaagaacgcgctggtgtcctactcgctggtggagcggcgggtgggcgagcacgcactgtcgagctacgtgtcggtgcacgcggagagcggcaaggtgtacgcgctgcagccgctagaccacgaggagctggagctgctgcagttccaggtgagcgcgcgcgacgccggcgtgccgcctctgggcagcaacgtgacgctgcaggtgttcgtgctggacgagaacgacaacgcgccggcactgctggcgactccggctggcagcgcaggaggcgcagttagcgagttggtaccgcggtcggtgggtgcgggccacgtggtggcgaaagtgcgcgcggtggacgctgactccggctataacgcttggctgtcctacgagttgcaaccggcggcggtcggcgcgcacatcccgttccacgtggggctgtacactggcgagatcagcacgacacgcatcctggatgaggcggacgctccgcgccaccgcctgctggtgctggtgaaggaccacggtgagcccgcgctgacgtccacggccacggtgctggtgtcgctggtggagaacggccaggccccaaagacgtcgtcgcgggcctcagtgggcgctgtggatcccgaagcggctctggtggatattaacgtgtacctcatcatcgccatctgtgcggtgtccagcctgctggtgctcacgctgctgctgtacactgcgctgcgttgctcagcgccgcccaccgtgagccggtgcgcgccgggcaagcccacgctggtgtgctccagcgccgtggggagttggtcttactcgcagcagaggaggcagagggtgtgctctgcagagagcccgcccaagacggacctcatggccttcagcccaagccttcagctgtctcgagaagattgtttaaatcctcccagtgaagtaagttattaatattatttagatatatttgtttccttgaagaacttccgtttaggttataactacattctctcatttttctttatgattctatcctttaaactatcgaatgtctcatctttcttggtcattcttactcattttgaacttttatgtatttgtctaacattaatgaaggaaatatgtaggtacaatggaggccatggagcaccacacttaatatttttctttttctataatattttatatgactgatgaaccttgaaaaaaacagtatattagattaaaaagtggccagatgtttgataacttaaaaatttaatttgttcataatttcaagattacaggtaagttgcaagaatggtacaaagagttcctagatcccattaatggattctttaactcttcctcacgtgcttaggcttttaaaatagccttcttgatcactattctaatttcagtacaatctagacattttcacattatattccaggtattatcacaataatataaatgatatgtctgacatatgatgaatgattttcttcattgctcacaaaatatcttctttatttcaagtaggaatagatactgtactattcttatttacatgaaatataataaaatcatttctcaatttaaaaatatttaaccatctgtacgatacagtacagttggtaaccaactgtggctcaaaccagtttcagatgatcccaaacttatcatagtataccactgccctgtgcctattaccaagtgaatcttctaatgtgcattttacatattttaactttctatttctacaaaaatatccagaggcttctctttaaccagggaataaagtcttacataccccagcctggtagtaaaggcattaaaatttccagccttatatctactttcttacatatctttagtttaggatctggaatatagtatatgttcaatcactttttaaaaacatatgggggtcttgctatgttgcacaggctggactagaacttctgggttcaactgatcctccatttcagcctttcaagtagctgagactacaggcaggctccaccactcccagcttcaatcaataattttaaataaatatatggtattgaaatgtattacctggacattcccctctatcttagaaatgagagtatgccctagaaatcagataatgttttattgaagagtgtcttgaaagatagacaacattttaccaagaaagtgttaagagagataagtaggaacaactgcacagtatatggtgtaattgaaggattagagcaggggagattgtgaaggcaggaaagctatttcttttttaataaattaggtatcaagtaatggagacttaaattatggcagtagaaatgaattgaaaaagacatatacaagaggcactggcaaagtagaagcagccagataatgacagactcaatacaaatgataagagaaaaacaaaagtagaagttgactctcacttttttagtttgttcagctgagaagatgacattgccattaaccaacctgcagaacaaggttggagaaacagtttgtgtgtatttgagcaggtagggaatggagatgaacatttaagaaaatgttactttgaagtcctaagagaataccgttgtgattggaaatatgggtctggatctcagaagagattattgatatagattttgggaacaactcctttagagaaaaaaataatccatgaaagaataaaattgccaagacagacattgaaaagtgaaaaacaatgtgtccaggtacttaggtgggtaagtgtgtcgcttcctgtggctgctataacaaacgaacacaaactgggtgctgtaaaacagcaaaagtttattatttctcagtattggagaccagaagtccaaaatcaaggtgttgtcaaggctatactctctttggaggccccagggaagaatctggtttttgtttcttccagtttctattggctgttggtgttccctggcttgtggctgtaccactcccatctcagccttctcagctttcatggtcacattgcctcctcctctccatgtctctctctatgtgttggttttacaaaggtacatgtgattgtatttagggcccatctggataatccaggataaactcctttcaagatccttaacttaatcatattattcaccatataaagtaaaatccacaagttccagggattaagatgtgggcataactttttggggaccacaattcaacctattatagtaggcttaaaatcatagaaggatagacaacaggaagctgaaataaagctcaaagtgcaatatatcaagtatatgttagaagttaaacatgaagggaaaaagataaacagaagaggttttccaccagaagtagaacatttaaattagtgtatgtgcgtgtgtgtatgtatacatattttagttaaagaagtttgactatcttcatagtgtgagtgaaagaaacaagtaaaaaataagatactaaaaataagacaggcagcaggtgaatttagatgaaaaccatgagagaatagaaaataatttttaagagcatatggttgaccttaaaagcgggaacagtttttccttacaactagtagaaaatgaaaacagataatataaggaaaaatgacacaagaagagagcaattgaatttctgtttggtcacatctctcaatgtgtgaatcatctgaaagtgaactgatggaaatgaggttgagaatttgagaagagaggaaagagaatatggaagaatctctgtaagcaagagggaggagttaattatcaattcacttgagagcccaactgaggtaaaggtgagagtaaatttgaagagaatagtcatggttaagtgacaatgttgagcagcttaataggaagcatagagaaaatggattgtcagtgtaactgcgtgttggaggctaaaaagaatgttagaggagtaatataaataggtgaatgactctagagtgtctggaagggcatattttaaatggttgactatgtagtctaattatgtgaagaggtaaataaagaaatgtagggccagatagaaagaattagaagagaaatactatgttagtaaaagtaatggagcaggagaggatgatgagggtaagagaataccaaatactctgcctaaattttcagaggagagcagagctatggaaataaacccaacagtcatttcctatagagttgtgcacagaacaggccagataattattggagctatgatatatttttcattacaccatttggcctgggattttgtggcttggtagagatagttataacaatagataaaagtaagatcctcttcctcttttccttgctaaagatatgttaacatctttgtctagctgttgtttcttggaaaattaaagtcaatttaaatgacggcaaggttttactcagtgatgatgaagtaagatggagagagaaaatggaaactttaacctcctggttaaattctatttaaccaggacgccgattcgggctacaatgcgtggctttcgtatgaattgcagccggcggcggtaagttaaattctattaaatcaataggatattagttccaggcatattttataaaaacagaatccaaaaccttagagcattgttgtggctaaattattgtgtttatgcacatacacacactcacatacaaaatcccacacatattgactgaacactttcttttgaatataaatatcttatctacatctcaagtcacattgagggaaatttattaatatgatgtgcttattcaaaatctgatatatcagttaccaatatttttcaccttcaccgattttattcttatgtgattgttatgtttccttttggagtcaatggctgttgtgtgaggaggtcttgaaaaatattacaggaagaggacagtaccacaaaaacctacatgactatgcagaactaccgatcaattgtcccaaaacgagtgtcgaatattctttgtcttaaagttctgcatggaattcttacacatggaaaaataaatttgtggcaaaatgaaactcatcaaccaattgtcagctaatataaaatgttgagcagaatgcagtgatttgctgtttctgggaaggtaaacatttaatcttcaattacatatttgcagtgaaaatgtcaggaaatgcaaggggcaaaaaaatactacatcaatggaaaatatgaagactgagtcatacttacacttacacgttcatgcgcatggtgtcgctcttcactgagaacgtttccgcgaagaaagccgccgtttctttcttcctgcagaaaatatagcagaaagcggaatacctcttgcgaatccttccgcactaggaagccataaaaattgggccttgagagacagtttgaggtaaggcgttgtatatattgcagatagctctgaggtttttggagtgtaccatgctgtcttcctggcaaggaggcccaagaccgcggcaactactgctctggcttctgatcctcgcagcctgggagacgggtagtggccagctccactactccgtccccgaggaagcaaaacacggcaccttcgtgggccgcatcgctcaggacctggggctggagctggcggagctggtgccgcgcctgttccgggtggcgtccaaaagacacggggaccttctggaggtaaatctgcagaatggcattttgtttgtgaattctcggatcgaccgcgaggagctgtgtgggcggagcgcggagtgcagcatccacctggaggtgatcgtggacaggcctctgcaggttttccatgtggaggtgaaggtgagggacattaacgacaacccgcccatattccctgaaagcaagaaacgaataatcattgcagaatctagacctccggaaactcgatttccactagatggcgcatccgatgcagatattggagtaaactcggcattgacctaccgactggatcccaacgattatttcactttggacgcacaaaacagtcttgagcaaatgtcttcattatcacttgtactgaggaaaacactggacagagaggaaattcaggaacatagtttattactgacagccagtgatggaggtaaacccgagctgactggcacagttcagctgctcatcacgattctggacgtgaatgacaacgccccggaattttaccaatccgtttataaagtgacggtgttagagaacgccttcaatggaacattagtgatcaagctaaatgccacagatcctgatgatggtacaaatggagatatagtttactcatttagaaggcctgtatggcctgcagtggtatatgcatttaccataaatccgaacaatggagaaattaggacaaaaggcaaactagatttcgaagaaaagaaattatatgaaatatccgtggaggcagttgacaaaggaaatattccaatggcgggtcattgtacccttttggtggaagtactagatgtaaatgataacgccccagaggttaccatcacttctttgtcactccccatcagagaagacactcagcctagcgccattattgccctaatcagtgtgtccgatcgtgactctggctcaaatggacaggtcacctgcaccttgacgccgcatgtccccttcaagctggtgtccacctacaagaactactactcattagtgctggacagcgccctggaccgcgagagcgtatcagcctatgaactggtggtgaccgcgcgggacgggggctcgccttcgctgtgggccacggccagcgtgtcggtgggggtggccgacgtgaacgacaacgcgccggcgttcgcgcagcccgagtacacggtgttcgtgaaggaaaacaatccgccgggctgccacatcttcacggtgtctgctcaggacgcggacgcacaggagaacgcgctggtctcctactcgctggtggagcggcgggtgggcgagcgtgcgctgtcgagctacgtgtcggtgcacgcggagagcggcaaggtgtacgcgctgcagccgttggaccacgaggagctggagctgttgcagttccaggtgagcgcgcgcgactctggcgtgccgcctctgggcagcaacgtgacgctgcaggtgttcgtgctggacgagaacgacaacgctccggcgctgctgacgcccggggctggcagcgcgggaggcacagtgagcgagctgatgccgcggtcggtgggtgcaggccacgtggtggcgaaggtgcgcgcggtggacgccgattcgggctacaatgcgtggctttcgtatgaattgcagctggcggcggtcggcgcgcgcatcccgttccgcgtggggctgtacactggcgagatcagcacgacgcgccctctggacgaggtggacgcgccgcaccaccgccttctggtgctggtgaaggaccacggtgagcccgcgctgacggccacggcaacggtgctgttgtcgctggtggagagcggccaagcgccacaggcttcgtcgagggcgtcggcaggcgctgtgggtccagaagcggcgctggtggatgtcaatgtttacttgatcattgccatctgcgcggtgtccagcctgttggtgctcacgttgctgctgtatactgcgctgcggtgctcggcaccgcccaccgagggcgcgtgcgcgccgggcaagcccactctagtgtgctccagcgcggcagggagttggtcgtactcgcagcagaggcggccgagggtgtgctctggggagggcccgcataagacggacctcatggccttcagtcccagccttcctccttgtctgggttctgcagagggaacaggccagagggaggaggactcagaatgcttgaaagaggtaagcttatattttaaaaaattgtcttagtaaacactttagccttccttgcagttgtttgtttaagacatctttcctgccaatttcaaattattctttactttaattttaattttgctagttgttatcgaatttaacaactctgctgtggacattatgtgttggattatccttcagagtgaaatcttaactcacaaaccataatgaaatgtgcaaaacaagaatattttgtttctgttgtattcttaatagttctaagtatttatcttgcaattgagcatttacaaaaaattcctcacgttgtgagaacttaaacatttagaaaatgtttgttttaatgaggctaatcgtaatcttaaatttaaaaaatttttagtttaatgtatacatatacccacaagatattattttaaagagccccataacttttcacataaatgctttttttaagtgcacttttctttctttctttttttaaactgttttgattgtctctacttttttgtcctctaggcacatcagtgttcccctctcatatatcccatgaaaaatatcttgtgattctgctttcaattttttatttgcattcagataattactcatacatatatatatacatatatagagagagacctggtaggctttttgttattatttcttttccaaagtttgaagggatttccaaaaggtactggtgactgaaagtaccttttggcagtccctgcaaatctaatggttttaatagctgtgtagtattccacagtgtaagtgtgcaattatatattatttacctaatgatgggcaatcactttgtgtcaagtgttctgttatcttcatgaaccatgctgtgctatcatttcatatatttcccaaaatattggtgttatttctacgaaattgattgtcagatgtggaattgatgcatcaaagatattaataattttaattataaaatatgtcactggattgccttccaagtattttggaaccaaccagttatgagcactctttctatctcaagaagcaatagtggttttactttctgctaatgtgatctctgtgaaatgatatttcactgttactttaattttaaattcctgtatagtattagtgaatttgagcatattgtcatatgtattttgttgatttgtatttgatcttctttgatttatccattaagttatttgcctacttttctattgaaaaaaaatttttagtttcagtttggaaaagttctctgtaccttatagatattaactgtttatctattttttgacatttttaattaaaatttttattttgagataattatagattcgcatgtggttgaaagaaatagtaaagggagatgctatgtattcttcactaagttttccccaatagtaacatcttacaaaagcgtagggccataccacaacctggatattgacattgatacagtaaagaagtaacatagttccgtaacaaccagattcttgatatcacctttttatagccacatctgcttccctgcctaatgctggcaagcagtaatctgttctccatttctctaattttgttacttttacttcagaaataaataaaagtatctctatttatagataaaattttttaaaattatttttatatttatttattttttattacactttaagttctgggatacatgtgcagaacgtgcaggtttgttacataggtgtacatgccatggtgtgcttatctattatctgcatcacaaatatgttttcctcctatattatttctattcatttgtttgtactaattttgtcatatataaatgtttttaaaatgtatgaattaaaatatatctttttccttttatggattttaaggtctgcatattcagttagaaaggtcttcccagctgggcacggtggctcacgcctgtaatcccagcactttgggaggccaaggtgggcggatcaggagatcaggagtccgagaccagcctggccaacatggtgaaaccctgtctctactaaaaatacaaaaattagcgaggcatggtggcacgcgcctgtaatcccagctacttgggaggctgaagcaagagaattgcttgaacccgggaggtggaggttgcagtgagatgagatcatgctactgtactccagctctgggtgacagagcaagacttcgtcttgaaaaaaaaaaaaaaaaaaaagaaaggtcttcccaactcctatattgaacattcattaattaaatgcatttaataaatacttattgagtgttctctatgtgccaggcatgttctacacattagacatttagcaacgaaatttattattttgtaaatccaaatttccagttggtatcactttcctactgcctgaaaaatttctttaatattttttatagtgcatatgttctggcaacaaattcactcagcttttgtctgagaaatatctttatctctttttttttttttgagacggagtctcactctgtcgcccaggctggagtacagtggcgtgatctcggctcactgcaagctccacctcccgggttcacgccattctcctgcctcagcctcccgagtagctgagactaccggcgcccgccaccacgccctgctaattttttgtatttttagtagagatggggtttcatcttgttagccaggatagtctcgaactcctgacctcgtgatccacctggctcggcctcccaaagtgctgggattacaggtgtgagccaccgcgcccggctctttatctcatttttatttttgaaaaagtattttcactgggcatagttgacagttttttaaaagatataattcagttgtcttctggcttgcatagtttctaataagatgtttgcttttttatatatgagtcttcctctccccacccctcatggttactgttaaaacttttctttttatcctgacttttgcagattgattgtgatgtgctttagtatggttttctttatgttagtctgttggggtttgttgatattcttggatctgtggatttatcattttcatcaaattcaggaaaaaatcaaccatacttcttctaatagttttttctttccttccatcctttctgagactccagtaacacatatgttacaatgacacaggtcattgaagcgttctttatttttgtccatttctttctctgtgcctcattttgaatatcttttattgacatattttccaagttcactaatttttccttttgtagtatcatatctgttaatcctaaacagtgtattcttcatttcagagaccatatttatttcttatctgtataagattctttttgtctcttttaaaatttattttacatgtctccaccgaatagtcatctttttatctatatgtttgagcatattagtacatgtataatagatgttttaactttcttgtctgctaatttcaacatttttgtccttagtttgcttcttttaatctatcttcttctatggatatattttcttgctgttttgcatgactggtaatctctaataagatgctagacattgtgaattttacattgtcggatgctggattttgtgtgtgtgtgcatgtgtgtgcgtgttcctttaaagcagtagttcttgataagaaacagttttgtcccctctaccccctacccaggagataatttggcaatgcctggatacatttttggttattacaactagggaattgctactggcatctaataatggagctctgagatgctgctaaacaccatccaattgctgccaaacatcctaccgtgcacaggacagccgcccaacaataaagaattagctcaaaatgtcagtagttccactgttgagaaactctgctttaaagagtcttggacttagttctgacgtgaagttaagttgctcagtaccaatttattcctttcaaggcttcattttaagatttgttagtacacattcagagcagcttttagtgtagcactaattcggccttctattacagcaatactttcctgaggacaccacctaatgccctgtgcattaagaggtctctcttctctgattggtaggaatgtgaaatatttccagccctttgtgagctctaggaattattctacccacttttttttttaattttgaagggatagcctgatctggggaggttgatcagtgatctgtgatctgtgatcacatcactccactgcagcctggtgacagagtgagaccatgtctcaacataaaaattaaaacattagaattgaggtttaatgttatcaaatattttatctgcatcttttgagggaggtataaattttttctttggcaatgttaatgtgttgaatttatgatttatgattttcttatggcaaaccaacctctacttccttggataaccgtaatttgattataatttataatccttttaatatactacttattttgttaaattttcaaaacaattttttcatctttattccaggtgatactgatatgtcctagtttttcttcctaatttcttctttgttaagtattcaagttataaataagaatctagcataacttgaatacttaacaaagaagaatagtctttgaaaacttccagaaaattttctgtttcctgtaaaagtttgtataatctttgaattacttcttatttgattggagaactcactgttgaagttatctgtatcaggattttgattggtgggaatatttctgattactgactcaattttaatagtataaggaccattcagagtttaatttactcgagtcagttacgtagataatattttttcaggtattttcctgtttaatctaaattttcagttatatgctcatactttctacagaatctatagtgatatttccctttccattcttgatattatttttgcttcctgtctaatttacttttcttcagaattctgctttctgatttttgtttttgctttgaaatatttttatattaattatactgattcatttctcttcttttcatttgtgtttgcaggagatgtcctcttcccagccttttattttaaaccttttagtattatgggcatattccacaagttctttgctactgtctcactgagtagcagagtctaatttttctttccttgaactttgactggtcttaatattggaagtaacattctgggatttatgaagtcaggtcataagaagtcttacagtatgctttggtctctgagaatatttgttttgggggaagcctgccaccatgtaagaattctgactaccttgagattgtcatactgtaaagaagctcaagctggacttgtgagaagccaaatggatagaaaaattactatccagtctccagttgtcttagctttccaagcttaggtgccagaaaaatgtagaaggcttcaggtgactgtagtgtgttggagctggctcttttactggcttatgagaactgataatgcaaatttattcccaactctggattcaatgatgtcactttggtagcttgaaattggccatggtaggagtatttctgccacagaaataggcaaatgctacaaaacagagttttttgtttttcttttttcccagagacctagttgttaagcatttaccagtacactactgcacctgattgcaagcaagaaccactcagttgagtcagaaccaggagaggtaatattaagttgttttaagatattaggtagttgggatggtttactatatagcaatggataacctgaacaagtactctttcttagataatctataaattttaacttgaatatttatttagtttatatttacaatacctagtgatatctttaggcacaaatatttcaattttttgtgcgttatttttgtctcaccatttttatgtctctatttccttcctttgttgatcttcttttgaaatgactgagtactttttattgttccatttccttctgtattatttggaagcccttttccgaatagctagtgcttaccctagaaaattaagcatgtatccttgatatatcaaaatcaaaagttaactgaaacccttcctccttctgggaaatgcagggaccttacatttttaaaatctttttaatcccttttgacttatatactatttctgtcatgctttaaaaatattttaaaaccccataagatattagtattattttatacaatcaacattgttttaaatgtacttacatatttaccagttttgtttctcttccttacttcttgcccctctgacctttcatcagggattattgtctttccatgttagaataatttgagagtttcctttagtccaaagatgctggtgaggaatgatttcaggttttgtttttctgaaaatgtctttatttcatcataattattgaaaagcattttttctgagggtataatcttaggtgtgacccccacagcacatagtaaatattattccagtgtctactggtttccattgttgctgtcaagaatttagctgtcaatctaaatgtcattcctttaaaggtattctgtttattttcctttggctgcttttcagattttctgtgtgtctgatattttgcagttttaccatgctgtgtctttataatcatcctgttctggattcagtaggattttttttaatttttaatttttccgtaagttattgggggtacaggtggtatttgattacatgagtaagttctttggtggtgatttgtgagattttggtgcatccatcacctgagcagtatacattgcaccatatttgcaatcttttatccctcgccaccccccactcttgcccccaagtccccaacgtccattgtataggatttttgaatttgtgaattaatgcctttacatcactttgagcatatcctcagctataatgttctccaatgttgcttctgttccattgtatttctatagtattattttagtactctaattaaacatattttaatcttattactctatcccatctatttctaccttttattttaacaccttttgctctttgggctttattgtggatagttcacccaccttaaagtttaataattctctcttcttgctgttgtctgaatttgtacccccaaattcatgtgttgaaaattcaatcccttatacaacagtgttgggaggtggggaatttcaggaaatgtttagattatgagggatctgccctcatgaataaattaacggcactgtaaaaggacttgatggaaggagcctgtccctctcttatgcttttggctctgtcatgtgacgatgcagcaagaagatcttcaccagatgctggtgccttgatcttggacttcccctaggctccagaattgtgagaagtaaatttccgttctcataaattactcagtctgtggcattctgttatagcagcacaaatggtctaagatacttttatttattctttttcaaatttattgttactttgtataatttctagtttcctctcgaaactttcaagcttggcatttatatctggaacacaataagctcatggttttagcgtctatttctgatatgtccagtaactgggatcctcatgggtctattcctgtggtgtgttttaaaattgtatctttatggtgttttgtctccacataaacctggttatctttgattttgtgctgaaagttgtattaaacacttcttcctggaaataatttggggcttataacattttctttctccagaatggattttaattgacttttgccaggcatcttggggcactagcaatcatgggtaatcttaatctatttcaagcttcaggtattctagataaaacctcattatctaaaatttacatgtattctttaagtacggttattcagtttcctagccaaacatgagagattgtttaagaagttccaccatgactggtagactcaggattctgacttttgtttctctagtccttggagactgtcaaaagtatatctcagtattcattcacctatttttttccttttatttccagttggtacataataattgtacatatttataggatacagagtgacattttgatacatatatacaatgtataataataaaatcagggtaattagcatattcataatctcaaacatttaccatttttgcatggtgaacatttaaaatccactcttctagcttcttgaaaatatgtaagaaattatagttaaccatatttatcctacagtgctacagtgctgcaaaacaccacaacccattcctcctgtgtagctataatttcgtatccattaaccaacctttccccatcctccttttccttcacccttcccagcctctgataagcacaatactacttccatgagctcaataaaattttgtagctgccgtataagtgagaacatgtatttatttttctgtgcctgacttatttcacttaacatatgccctccaggctcagccatactgccatgaataacaggatttcattcttttttatggctggataatattccgttgtgcatatacaccacattttctttatccactcatctgttgatggatattgaggttgattccacatagtagctattgtgaatagtgctgcagtaagtatgggaggtgcaggtatcactttgacatactggtttccttttctttggataaatgcccaatagtggaattgctggatgatatggtagttctatttgtagttttttgagggactcccatactgttttccttagtggcagtgctaatttacatgcccaccaacagcatttatgggacagtggctcatgcctgtaatcccagcacttagggaggcagaggcaggaagatcgcttgaagccaggagttcaagaccagcctgggcaacatagcaagaccctgttcttcacaaaaaagaaaaaaaaagcagttgtagaactcctttaagtatttcttgtaggacttatctagttgtagtgtacttcctcagtttttgcttgtttgggaaatactttatttctccttcatttctgaagtatagctctgcttggtatagtatttttggctgatagttttaaaaaatttcagcactttggatatatcatctcattctatcctagcctgtaaagcttctgctgagaaatctgctgttagtctgatgggaattttcttataggtgacttgtcacttttcttttaccgtttttagaattccctccttgtcttgagtctggtaccgtagactactcagccatcctgatgccctacctcttgtatagaaacaacccagatccaaagtggccagaaagttactttaccttctgaatttgtggtctttttcagaatctctacctgttaattctgcatgactttattagtcattagatacttttataattttaaaatatctccaattgtatggttggttcaaattaccagttctgcatactggtaatgtaagtcctctgttgaattgatttttaaatacatttattttattccagtatcttctagctcctggtgttgcagatgagaagtttcaaataacttgaaataattcccttctatgtaattatccctgattttgactttctttccatagttatatattttttctatgctattatattctcattttaaagatgttgaatgacaatgtaattttcttttctttacaagtggtagcttatttacaagtatttttgaagtttattttcctggaaagttttcttaaattatagattttagtatttcttctgttttattacttcagatttcttcttcaatggctccaattatatttgtattagatattctttgcttttcttttgtagctaacactcctaaatcctacctagctcttttttaaaaaatattttactttttattcttgttttcatcttatagttttctttaggcattatccatagtgtttatatgctgttatgtgccttctggtttagtgtttacttctgaaaaaattattttccttttttttaatattttactgagttttctcatctctcttttcaaagcttttcttctccaatcatatcattactgagtctctctaattctgatttgtgtattcttgcatagcttttcattattttctaaaaatgtttaagttgttttcaaatattacgtagcaatttgtggaattttttttcttgtgtgtatttatttcctttagtgtaattatttgtcctctcctttaaaaataattttatatcagatttgcccataatccttttcttatgctcatttttatatgaaaagtgctcccccataattttagaagaaacagaccaggataattttcctatctttgttgctctatagatttctattcagctattgtcatgaaatgataaaaatataattttttaatgtcttactttgtgacatcctttaccctttttacttggacctttttcctttgtttaattgtcccccacccacaccattctgcttcatatggactcaattcctatcagttcctcctcagtataggggtttttgctacaagaagacatttgttagttgacaagttcatagggctaagacaggtttagcacaatccaatctatttgtagtcccttctgctaagttttgaatttgcttttatttctaatattttactgagttttctcatctctcttttcaaagctttcttttttttcttactcagggataattgaattaggaccttcgatttccccccttccacccatgactattgttctcaaattgttttactatgctttccagtgagtacttattggcactttttggagttcttcaattctcaacaccatcaaaagccccataaccttcttttgcttcctcctgagactcttttcatgtgcttattggtcatttctttatcctcttcggagaaatacctattcagaacttttgcccaatttttaattggtttattcgtttttcaattgttgagttgtaagagttctttatatattctagatgcaattactttattagatatataatttgcaaagattttctcattgagggtgttgtcttttcacattcttttttagctcccacttataagtgagaacatgtagtatttggttttctgtttctatattaattcacttgggataatggcctgcacctccattcaatgggctgcaaagggcatgatctttttctttctttatggctgcatagtattcaatgacgtatatgtacaatactgtattgtattgtattgtatttttttcagacaaagtctcactcttgtaccccaggctggagtgcaatggcgcgatctcggctcactgcaacctccgcgtcccgggctcaacaattatcctgcctcagcctcccgagtagctgggattacaggtgcctgtcaccaggcctagctaatttttgtattttaagtagagacagggtttctccatgttggccaggctggtctcgaactcctgacctcaggtgatccgcctgcctcggcctcccaacatgctgggattacaggcgtgagccactgtgcctggccaatgtactgcattttatttatccagtgcaccattgatgggcatttaggattattctctgtctttgctattgtgaatagtgccatgatgaacatacacatacatgtgtctttatagtagaatgacttatattcctttggttatgtacacagttatgggatttgctggcttgaatggtaagttctttgagaaatcttcaaactgctttccacagtggctaaactaatttatattcccgccagcagtgtataagcattcccttttctctgcaacctcaccagcatctgttatttttgactttttagtaatagccattctgactggtgtgactgcaacctccacctcctgggttcaagcggttctcctgcctcagcctcctgagtagctgggactgtgcaggcacacaccacaaagcccagctatttttcttttttttttttgtattttaagtagagatggggttttgacgtgttggccaggctggtctcgaactcctggtcttaagtgatccacctgccttggcctcccaaagtgctagtattacaggcatgagtcactgtgcccggccctttgcccattttttgatgaggttgtttgttttttgcttgttaatttgtttaagttccttatagattctggatattagacctttgttggatgcatagtttgctgatattttctcccatcctgtaggttgtctgtttactctgttcatagttgtttttattttttaattttatgggtacataataagtgtacatatttatggggtatatgagacattttgatacaagcatgcaatgcacaataatcacatcatggaaaatggaatggccattcccttaaacatttattctttgcacaaacaaaccagttatgctcttttagttatttttaaatatacaactaaattatttagaccatagtcaccctattctgctgtcaaatactatgtcttattcattttttctattttttatcctcattaaaaatctccactttctgtccacaccccactaaactttctagcctttgttaaccattcttctactgtctatctccatgggttcaaaaaatatatttttttattatactttaagttttagggtacatgtgcacaatgtgcaggttagttacatatgtatacatgtgccatgctggtgtgctgcacccattaactcgtcatttagcattaggtatatctcctaaagctatccctcccccctccccccaccccacaactgtccccagagtgtgatgttcccttccccttcctgtgtccatgtgttctcattgttcaattcccatctatgagtgagaacatgcagtgtttggttttttgtccttgcgatagtttactgagaatgatgatttccaatttcaaccatgtccctacaaaggacatgaactcatcattttttatggctgcatagtcttccatggtgtatatgtgccacattttcttaatccagtctgtcattgttggacatttgggttggttccaagtctttactattgtgtatagtgccacaataaacatacgtgtgcatgtgtctttatagcagcatgatttatagtcctttgggcatatacccagtaatgggatggctgggtcaaatagtatttctagttctagatccctgaggaatcgccacactgacttccacaatggttgaactagtttagagtcccaccaacagtgtaaaagtgttcctatttctccacatcctctccagcacctgttgtttcctgactttttaatgattgccattctaactggtgtgagatggtatctcattgtggttttgatttgcgtttctctgatggccagtgatgattagcattttttcatgtgtcttttggctgcataaatgtcttcttttgagaagtgtctgttcatatcctttgcccactttttgatggggttgtttgtttttttcttgtaaatttgtttgagttcattgtagattctggatattagccctttgtcagatgagtaggttgcgaaaattttctcccattttgtaggttgcctgttcacgctgatggtggtttcttttgctgtgcagaagctctttagtttaattagatcccatttgtcaattttggcttttgttgccattgcttttggtgttttagacatgaagtccttgcccatgcctaagttctgaatggtaatgcctaggttttcttctagggtttttatggttttgggtctaacgtttaagtctttaatccatcttgaattaatttttgtataaggtgtaaggaagggatccagtttcagctttctacatacggctagccagttttcccagcaccatttattaaatagggaatcctttccccattgcttgtttttctcaggtttgtcaaagatcagatagttgtagatatgcggcgttatttctgagggctctgttctgttccatttatctatgtctctgttttggtaccagtgccatgctgttttggttactgtagccttgtagtatagtttgaagtcaggtagcataatgcctccagctttgttcttttggcttaggattgacttggtgttgcgggctgttttttggttccatatgaactttaaagtagttttttccaattctgtgaagaaagtcattggtagcttgatggggatggcattgaatctgtaaattaccttgggcagtatggccattttcacgatactgattcttcctacccatgagcatggaatgttcttccatttctttgtatcctcttttatttcattgagcagtggtttgtagttctccttgaagaggtccttcacgtcccttgtaagttggattcctaagtattttattctctttgaagcagttgtgaatgggagttcactcatgatttggctctctgtttgtctgttattggtgtataagaatgcttgtgatttttgtacattgattttgtatcctgagactttgctgaagttgcttatcagcttaaggagattttgggctgagataatggggttttctagatatacaatcatgtcttctgcaaacagggacaatttgacttcctcttttcctaattgaataccctttatttccttctcctgcctaattgccctggccagaacttccaacactatgttgaataggagtggtgagagagggcatccctgtcttgtggcagttttcaaagggaatacttccagtttttgcccattcagtatgatattggctgtgggtttgtcatagatagctcttattattttgagatatgtcccatcaatacctaatttattgagagtttttagcatgaagggttgttgaattttgtcaaaggtcttttctgcatctattgagataatcatgtggtttttgtctttggttctgtttatatgctggattacatttattgatttgcatatattgcatcccagggatgaagcccacttgatcatggtggataagctttttgatgtgctgctggattcggtttgccagtattttattgaggacttttgcatcaatgttcatcaaggatattggtctaaaattctcttatttggttgtgtctctgcccggctttggtatcaggatgatgctggcctcataaaatgagttagggaggattccctctttttctattgattggaatagtttcagaaggaatggtaccagttcctccttttacctctggtataattcggctgtgaatccaatattttgttttgtttttcctttttgagacaggtcttgctgtgtcacccaggctggagtgcagtggtattaacagaactcagtgcagccttgacatcctgggctcaagcaatcctcctgcctcagcctcctgaatagctgggaccacaggcatgtgctgccatgcccagctacttttttgattttttttgtagagatgaggtctcactttgttacccagtttggccttgaattcctgggctcaagtgatcctttaacctcagcctccaaaagtgctgcagttacaagcatgcgccaccatacctggccttgttttgatttttaggtaccacaaataagtaagaacatacgatatttgtctttctgtgcctggtttatgtcacttataatgacatccagtttcatccaggttgttgcaaatgactggatcttgttttttttatggctgaatagtactccattgtgtatatgtaccacactttcttttctgtttttttagacagtctcacttttgtcgcccaggctggagtaccgtggcgcaatcttggctcaccgcaacctctgcctcctgggttcaagcgattctcctgcctcagcctcccaagtagctgggattataggcacgtgccaccacggccggctaattttttatttttagtagacacggagtttctccatgttggtcagactggtctcaaattcccagcctcaggtgatctgcccacctcggctttccaaagtgctgggattacaggcgtgagccacggcaccggcccattttctttacccgttcatctgatgatggacatgtagattgcttccaaatcttggctattgtgaacactgctgcaatgaacaatgggagtgcagttatctcttcaatatactgatttccgttcttttggaaagaaaggaaatcctacctagcagtgggatttctggatcacttggtagctctatttttggctttttgaggaaactccaaactgttctccatagtgcttgtactaatttacattcccaccaacaatgtacaaagtttccctttttttcacctctccagcattttttattgcctgtcatttggataaaagccattttaactgtggtaagatgatatctcattgtagttttgatttgcatttctctgattatcagtgatgttgagtatcttttcctatacctgtttgctattagtatgtcttcttttgagaaacatctattcaactcttttgcccattttaaaattagattattagatttttttttctatagagttgtttgagctccttctacattctggttattcatcacttgttagatgggtagattgtaaatattttctctcaatctgtgggttgtctcttcactttgttgattgtttgcttttctgtgcagaaggtttttaagttgatgtgatcccatatatccatttttttcctttggttccctgtgattgtggggtattactcaagaaatttttgcccagactgatgttccggagagtttccccaatgttttcttgtagtcgttttatagtttgatgtcttagatttaagtctttaatccattttaattcaatatttgtatatggtgagagataggggtctagtttcattcctctgcatatggatatctagtttcccagcacagactgtcttttctcgagtttatgttcttggcaccttcatcgaaaatgagttcattatagatatgtggatttgttttttggttctctattctgttccattcatctatgtgtctgtttttatgccagtgccatgatgttttggttactatatctctatggtataatttgaagtcaggtaatgtgattcttccggttttgttctttttgctcaagatacctttaggtattatgggtattttgtagttctatatacattttcagattgtcttttctatttctgtgaagaatgtccatggtattttgacagggattgcattgaatttgtagattactttgggtagtatgaacatttttacaatattgattcttccagtccataaacatgcaatatctttccatttttttgtgtcctcttcaatttctttcatcagcattttatatttttcattgtggagatctttcacttctttggttaattcctaggtatatttagttttattcgtggctatcgtaaatgggattactttttaatttcattttcagattgttcactgttgggacatatagaaatactactaatttttgtatgttgattttgtatcctgcaactttactgaatttattgttttaatagttttttggagtctttagatttttttaaaactgagattatatcatctgcaaacaaggataatttgatttcttcctttctaatttggatgtcctttatgtcttctctctctctctctttcttttttttttttttttttgagatgaggacttgctttgttgcccaggctggtctcgaactcctgggctcaagcaatcctcctgcctcagcctcccaaagtgctgggattacaggtgtaactcacttcgcctggcctaggaagccctttatttctttctcttgtctaattgctctagctaagagtactatgttgaatactatgttgaataacagtggtgaaagtgggcatccttgtcatattctagatcctagagaaaaggctttgagtttttgcctgctcagtatgatactagctgtgagtctgtcatatatggtttttattatgttgaggtatgttccttctatacccagatttttgagggtttttaagatttcaatagttttgggaaacaggtcgttttcagttacatgggtaagttatttagtggtgatttctgagattttggtgcacctgtcacccaagcagtgtacaccgtacctaatatgtgtagtcttttatctttcactcccctcccacccttccctccaagtcccccaaatccattatatcattcttatgtctttgcattctcatagcttagctctcacttgtatgtgagaatatacaatatttggttttcgatttctgagttacttcacttagaaaaatggcgtccaggtccacccaagctgctgcaaaagctattattttatttagtttatggctgagtagtattgcatggtgtatatataccacattttctttatccacttgttggctgatgggcatttaggttggttccatatttttgcaattgtgaattgtgctgctatcaacatggcttgcacatgtgtctttttcatgtaatgacttcttttcctttgggtagatacctgatagtggcattgctggatcaaataatagctctacttctaaatctttaagaaatctccaaactgttttccatagtggttgtgctggtttacattcccaccaatagtataaaagagtgtccttttcaccacattcatgccaacatctattactttttgatttttaaattatagtaattcttgcaggagtgaggtagtgtctcattgtgcattaggaaatttagtatacaataaagacagcatttttattgaggaaaggatgcattttaaaaaacaagtttttcaaaaatatagggaggattgtggttacttctagaaacagtagtgcagtcaggaaaaattcagcacaatatgtatcagtggaattcatctgatcaaacttaaaatattattccttgcattatagttctgagcaggtaccatagataatagttctattgtgttgttcactttaaactagagcaagaaacttttctaataagtggaattgggagctgtctagctggtgttggcctgataaatgcttaatacacatgaatgtgcatgcatatgtatgcatataccatatacatatattataaatttaactgatataaaagatgtttggtaaatagtttaaaatagtaataaaatatacaattctccctattatcaattattacagaatgtttcccttgatttttgctgaacttttctatccataaactatctatggttgtaattgacaagtatagttctcacatgaatgtctgttggtattttcatttatcttaacaaataatatagagtaaaatgacaaagacattgaatcttgacctgtttgtcaatgatgtgacttccttgctgcattggataatacctcttaaatactggaaaattatttgttgatttttggtctattcacaatgtaacagctacaaatatgatacactttaaaaaataatggtataatttaactttttaatttttttatttcaatgggtttttggggaacagtatttggttacatgaataactactttagtggtcattgctgagattttggtgcacccatcacccgagcagtatacattgcacccagtttgtagtcttttattcctcacccccttcccaccctttccccctaagtccccaaagtccattgtattatacttatgcctttgcatcctcatagcttagctcccacttatgaatgagaacatgtggtgtttggttttccattcctgagtttcttcacttagaataatggtctccagttccatccaggttgctgagaatgccattatttcattcctttttatggctgagtagtattccatggtgtattatatatataatacatatattttatatatatgtatattacaatttctttatacacttgttgattggtggctatttggtctgattccaaatttttacaattgtgaattgtgctgctataaacttgtgtgttcaagtatctttttcatataatgacttttttttcctctgggtagacacccagtagtgggactgctggatcaaatagtagttttacttttagttctttaaggaatctccacactgttttccatagtggttgtactagtttacattcccaccagcagtgtaaaattgttcccttttcaccacattctggccaacatctattatttttttattatgaccatttttgcaagaataagatggtatcacattattgttttaatttgcattttcctgataattagtgatgttgagcatttttttatatgtttcatatcttcttctgagaattgtctgtttatgtccttagctcactttttgatgggatttgtttttcttactgatttgtttgacttccttgtaggttctggatattagtcctttgtctgatgcagaatttgtgactattttctcccactctgtgggttgtctgtttactttgctaattcttttctatgcagaagctttttagtttaattaggtcccatttatttatttttgttgtagttgcactttcttttgggttctcagtcatgaattgtttgcctaagccaatgtctagaagagtttttctgctgttatattttagaattttcatggtttcaggttttagatttaagtctttgatccatcttgagttgatttttgtgtaaggtgagagatgaggatccagtttcattcttccacatgaggcttggcagttatcccagtaccatttcttgaataaggtgtcctttccacactttgtgtttgtatgctttgttgaagatcagttggctgtaagtatttgactatatttctggttctctgttctgtttcataggtctgtgtgcctatttttataccagtaccatgctggtttgataactacagccttttagtataatttaaagtcaggtaatgtgatgccttcagatttcttctttttgttttgtattgccttggggatgtgggctcttttttggttccatatgaactttaggattgtgtttttctagtcatgtgaagaatgataatgatattttgctgggaattgcattgaatctatagattgcttttgacagtatggtcagtttcacagtattgattcctgtcatccattaacatggaacatattccatttgtttgtgtcatttatgatttccttcagcagtgttttgtagttttccttgtagagatctttcacctccttggttaagtatattccgaagtgtattagtcagggttctctagagggacagaattaataggctagatgtgtatataaaggggagtttattaaggagtattaactcacacaatcacaaggcccaacaataggccatctgcaagctgaggagcaaggaatccaatctgagtcccaaagctgaagaacttggaatccgatgttcaaggggaggaagatccagcatgggagaaagatgtaggctgggaggctaagccagtctaatctctccacgttcttctgtctgcttttattctggctgcactggcagctgattagatcgcacccacccagactgagagtaagtgtgtctttcccagtccactgacacaaatgttagtctcctttgataacaccctcacagacacacccaggaacaatactttgcatccttcaatccaatcaagttgacactcagtattaaccatcacaagtcctccccttgtcaacttgaacccatacacacctcctgaaattatagataatcttcaaattaagacaataataaggtcataattattcccaacatgatacaactatccttcatacaaccaagaatgcaccaattcccaacccaaatgctattacataaagttaacatttaaattttcatatgaagtcaataaatcttatgtcacatgataaacaagaaaggaaataaaatgaagatattttcttagtacaaatgtataaatgcacaaacatgtttttaacaaagaaggaggaaatactcacgacaattaaaatcctcatttctgcaactggttgtgtggttcatagctggtattgatgactaccttcctctactactcattctgtattccctttgccttcagcaagcacctcagcaggtagtggttttttcctggtgtagtgacccaaaccttcattcctgaaggatctgggccatttgtagtcctgcctggattgtgctgttgtagtttcccattgacacagggcatggtaatactaagagacaccctaagggatcttgtgtattccatgcatactcttccttacctccactgtggagtagtagactgatttcatcttgagagtctgggtcagtcaccccagccaacactgtaacttccttcttagattgttggtttaaaggtaggaggagcccaaaaagtgtcccggtgtcaatcttaatttccagtttaatggaatcgtggttgtgtcttctggtggcagcattcctccctctggaactaagacctctaggccagcagaacataatgtcacagggacagtaagcaaaaattttactagtgggtcactaggggtgatggtaagtggtgccacttccacttccaccccttgattcctggacctgtgaattccggctatgggagaaacagtaccatatattggatgctgattcagagcatacacaaccttctggagaattttgccccagccctgcaaagtattgtcacctagttgacattgtaattgtgacttcaaaaggccattccatcattctatcaatccagctgcttcaggatgatggggaacatgtaaagaccagtgaattccatatgcatgagcccgctgctgcacttctttagtcgtaaagtgagtgccttggtcaaaggcaatgctgtgtggaataccacgatggtggataaggcattctgtgagtccacagatggtaatcttggcagaagcaatgtgtgcaggataggcaaacccatatccagagtaagtgtctattccagtgaggacaaatcgctgccctttctatgatggaagaggtccaatataatcaacttgccaccaggtagctggctgatcaccctgaggaatggtgccatatcaagggctcagtgttggtctctgctgctggcaaattgggcactcagcagtggctgtagccaggtcagccttggtgagtggaagtccctgttgctgagcccatgtgtaacctccatccctgccaccatggccactttgttcatgggcccattgggtgatgacaggggtggctggggaaagaggctaagtggtgtccacagaacgagtcatcctatccacttgtttattaaaatcctcctctgctgaggccagccgttggtgagcactcacatgggatacaaatatcttcacagtttttgaccactcagagaggtccattcacataccttttccccaaatttctttgtcaccaattttccaatcatgcttcttccaagtccttaaccatccagccaaaccactggctacagcccattaatcagtatataattgcacatccggccatttctccttcatgaaaagtgcacaaccaggtgcactgattgaagttctgtccactgggaagatttcccttcactgctgtccttcaggtatgtcctaggaaggggctgtagtgctgcagctgtccactttcaggtggtggacatatcatgcagaaccatctgtgaaccagtccttagtcttctcttcctcatcaactgatcatagggaactccccatgaggccattgttgcaagctggggaagagaaggaagggcggcaggagtggagaccatgggaatttgagccactacctcatgtaacttacttgtgccttcaggacctgctcgagcccgatcacatatataccacttccatttgatgatggaatgctgctgtgcgcaccccactttatggctagatggatcagaaagcacccagttcatgataggcagttcaggttgcttggtgacttgatgacccatagtcaaatgttcagtttccaccaaagcccagtaataggccaagagctgtctctcaaaaggagagtagttagctgcagaagatggaagggccttgctccaaaatccttgaggtctccactgtgattcacttatgggggcctgccaaaggctccaaatagcatccctatctgccactgacacctcaagcaccattggatctgctgggtcatatggctcgagaaacagagcaacttgcacacagcctggacgtgttgtagagtcttctcctgttctgtactacattaaaaagtgagagccttttgggttactcgataaatgggctggagtaacatacccaaatgaggaatgtgttgcctccaaaatccaatagtcccaaataagcctctttcgtggttgtaggaggggccaaatgcagcaacttatccttcaccttagaaggaatatcttgataggccccactccactggacccctagaaattttactgaggtagaaggttcctgaattttagtcatttattttccatactctggcatgcaaatgtctcaccaataagcccagtgtgtttgctacttctcactcactgggtccaatcagcaaaatgtcatcaaggtaatgaaccagtgtgatatcttatggaagggaaaatcaatcaagttctctccaaacaagattatgacacaaagccggagagttgatatacccctgaggtaggatggtaaagatatattgctggccttgctgactgaaggcaaattgcttctggtgggccttatggacaggaatggagaaaaaggcatttgccaaatcaatggttgcataccaggtaccaagagatgtgttaatttgttcaagcaatgaaaccacatctagtacagcagctgcaattgcagttaccatttggttaaacttatgataatccactgtcattctccaagatccatctgtcttcttcacaggctaaataggagagctgaacggggatgtggtgggaatcacaacccctgcacattttgagtccttgatggtggcactaatctctgcaacccatccagagatgtgatatgttttttgatttactatttttctaggtagaggcagctctaattggtcttcctattttgtcttttccatcataatagccctcactctaccagtcagggagccaatgtgggggttctgctagctgctaagtatacctatgccaattatgcattctggcactggggaaatgaccacaggatgagtccagggacccactggacccactctaagtcagacttcagctaaaactccataagcccctactttaactggaggaccaccaggacgttttcggtcccctggagtcaacgtcagcttagagacactgttcagtagtccctgaaatggcaatcatttccctttccccaatcacagttactctggtaaaaagccgtaggtctccatggggaaggatgggagaaagactaacagcataaattgttgtcagtgtcatccttgtatccctgggataaatcccacttggtcataataagtgatcttttaacagcgtaaattgttgtcaaggggaaccagcctccccttcatttaagggattctaggtctgtaaactggtttaagtctggaaattgattgaggggaaattgatcctctgtttttataattcaaattagtcttttgtccacttgacctggaagttttctgcttatataaattaaataagaatgcaataggcttcctatcattttcacttctaggaacaccatgattaatcaacagatgccagagatctacatgagtcagactattgtgattgctgctttgcctctgctgtccattatggtagctatgcccaccttgcctttgacagttgactggcccctgccacctcgagatccaattattcccattgcatttaagttttgtagttgagtgactgtggttcctactgtaaaatctggcatacagagaagagcaatcacaaagctcttcaaggatgcaggtactcccctcacaaatctattttgcaaagtattagtcaaggatatattttctggatcctcccagctgggatgagtaggtctaaactgactaatccactccaccatcccaatctccctaaaccttttgatcccttcctctacattaaaccaagggagatcaggcatttccagcttgctcacagtgggccatcttttaatccatatttcagctaaccaagcacataaattatcagaacctttttaaactccccaagctgcaacattaaatgcagaatccctgcttagtgggcccaaatcaataaattcagcctgatccaatgccttggatctatgttccatccaccattatcccacacccttaatatccattcctatgcctgtcctccagatttttgcttatataaataagaaagctcaagcagttcttttcgagtgtagcacacctcctcatgggttatactctgaacctcacccctagggccctcctgggactttagtctagttataggtctagaagcaaacaggggtggtggggggtgggtcctgaggagaatcaacattatcttgcctggcaactgcctcaggggaagccatcactgttgcctcaggcagtgcagggtttttctcctcagacaaatgtggaaaggctgatggcagtgtgggttggggaggacatgttgccactactggggatgagaaagctgtttcttctggcaaaaaaagtttcatcagaatttataatctcagtgtccccagcttcatcagggtccttttacatatccccattccaagtttcaggatcccattcttttccaatcaatgccctcatttcaacagtagacacctggcaaggctgtgcatgcacctttcattgcaggtcagccactggtatgataagaacttgtgtccaatttcccgcaatttcagctctttctctacaggagataagactctcactcagggcaatcttagcaggtttgaggttcagtatctgcttctgaagctaggaattagaatccctaagttcatcattttctttcatcactttgtccagtgaacttaggaggaaccaaccaacttcattatgttccttagttccccacatatggtcaaaggtattacatatagagttactaaactccttgcctctcacgaaccgtgcatcaggagtgtcaaatgaatttattttgtgtaactctgtaaacagttcgtgccaaggactatcagtgttctccatactattagaagtacagtccttagcatttttgggtctaatcatattaagcagccttctccagaaaccccaaaaccaatgaaagaactccatccttaatagtctgttcttctggaaccactcctgggaccaaaatctgtattagtcagagctctctagaggacagaactaataggatagatgtatatataaaggggaggttactaaggagtattaactcacatgatcacaaggtcccacaataggccatctgcaagctgaggagcaagcaagccaatccaagtcccaaagctgaagaacttggagtccaatgttcaagggcaggaagcattcagcacaggagaaagatgtaggctgggaggctaagtcagtctaatctctccatgttcttctgcctgtttttattctggctgtgctggcagctgattagattgtgcccacccagattgagggtagatctgcctttcccagtccactgactcaaatgttaatctcctttgatgacaccctcacagatatacccaggaacaatactttgcctcctgtaatccagtcaagttgaccctcagtattaaccagtacactaagtatttttttttttttttgcagctgttgtaaaagggattgagttcttaatttgattctcagcttggttattattggtgtatagcagtgttgctgatttgtgtgcattgattttgtatcctggaactttactgaattcatttatcagatctaggagctttttggatgaatctttagggttttcagagtacatgatcatattgtcagcaaacagcaacagttttaacttcctcttttccaatttggatgccctttatttcttcctcttgtctgattactctggatgagactttcagtactatgttgaatagaagtggtgaaaatgggcatccttgacttattccaggtctcagggggaatgctttcaacttttctccattcaatatgatgttggctgtgggtctgtcatagatggcttttattactttgaggtatgtcccttctatgccaattttcttgagggtttttatcataaagggattttgaattttattaaatgctttttcagcatcaattgaaatgatatatggtttttggtcttcattctgttgatatgatgtatcatattgattgatttgtgtatgttgaatcatccttgtatccctgggataaatcccacttggtcttttaactgtattgttgaattcagtttgctagtattttgttgaggatttttgcatcaatattcatcagatatattggcctggagttttattttattttgatgtgtcattgtttggtatcaggataatactggcctcatagaatcagtttggaagttaacccctcctctactttttggaatagtttgagtaggattggtattagttcttctttaaatgtttggtagaatttggcagtgaagccaatgggtcccaggctttactttgctgggagactttttgttacaactttgatctaattacttgttattggtctgtttaggttttaatttcttcatagatcaaccttggtaagttgtatgtgtctaggaatttatccatttcctctagatttttaaatttattggcatatagtggctcatcatagccactaatgatcctttgaattcctgcagtatcagttgtaatgcctcctttttcagctccgattttatttacttgggtcttctctctttttttcttcattagtctgtttaaaactttgtcaattttatttatcttttcaaaagattgactttttgttttgttgatctcttgtattttcatcatttcaaatatatttctgctttgatctttattattttctctactaattttggattcagtttgctgctgcttttctagttctttaagatgtatagttaggttatttaaaatgaggttttcattcttttccaatgtaggcaattacagctacaaatttccctctaatagtactccttttgttgtatctcataggttttggcatgttgtgtttccattatcatttgtttgaatcaaattttcaatttccttttaaatttctttattgacccactggtcattcaggagcatattgtttaatttccatgtgttcatgtagtttccaaaattccccttttttatttctaattttacttcattgtggtcagagaagaatcttgatatgatatcatttttaaaaaaatattttaggacttgtattgtgactagcatatggtctatctttgagaatgatccacgtgctgagaagaatgtgtattctgcagctgttggatgaaatgctccataactatctattaggtcaatttgttctatagtgcagattaagtctgatgtttctttgttgagtttttgtctgtcagttctgtccaatacggaaagtggggtgttgaattctccacctattattgtattgtgatctctatctctcttttagctctaatactatttgctttttatatctgggtgcttcaatggtgggtgcatatatatttataattgttatatcctcttgctgaattgaccccattatcattgtacaaagaccttctttgtctctttttggagtttttgtcttgagatctattttatctgttataagtgtagttacccctgctcctgttttgtttccattagcaaggaatatcttttcccatgtctttattttccagtctatgtgtatcttcataggtgaagtgtttcttgtgggcaacagatcattgggtcatgttttttcatccattcagccactttatttctttttattggagagtttagtccatttacattcaataatttcatttaagtaggaacttcctcctgccattttgtaatttgttttctcgtggtttcatggtcatctctcccttctttccatcttctttttcatgaaaataattttctctggtggtatgatttaatttcttgttttttattttttgtgtatccattgtatgtttttccatttgaggttacatgaggtttatgacttatcttatgacccattattttaaactgatggcaacttaacagactgcataaacaaaaaacaaacacacaaaaggaagactaataaaagttctacactttaactgtatcctcctgcttttaactttgtgttgtttctctgtgtcttattgtactatgttgtgaaaagttgtcttttttttttttttttttctgagtcagagtcttgctctgctaccaggctggagtgcagtggcctgatcttggctcactgcaacttctgcctcctgggttcaagcgattctcctgccttagcctactgagtagctgggactatgggcacgcaccaccacaacacccacctaatttttatatttttagtagagacggggtttcaccatgttggccaggatagtctcgatctcttgacctagtgatccgcccatcttggcctcccaaagtgctgggattacaggcatgagccaccatgcctggccaggttgttattatttttgaccagttcatcatttactctttctacttaagataagtttacataccacaattacagtgttataatattctgtgtttttctgtatgcctattcttaccagtaagtgtctcggcattgaagagctaggtatttcttatagtctttgcagtctgggcttgtttatccctgtccttcttgagaaggttttccagaaggtttttatttgaaggagcttgggcctcaatcccaataatactgtggtttttgcagactagtagaggtaccatcttggaggtcttgaataagatccagaatgattatctggattgccaggcaaaagcacttgttcttttcccttactttctgtcaaacagtctctttctgtctctctctctctctctctctctctctctcaaggtgctgggccatcttgaactaggggtatggtgatgcaagcactcctgtggcccccactttggattgtgctgggtcagacctatagccagcacagccctgggtcttgtccaaggcctgctgtaaccactacctgactaccacctatgttcactcaaggccctagggctctaagatcagcagggggtgacaccagccaagtttgcatccttccctttagggtagcaagttccccctggccctgggcaggcccagagatgctacttgggagtcagggattggagtcaaaatacttagaaatttgcctgatattttatttgactacggctaagctggcactcaaaccacaagacaaagtctttcccattcttccctcccctttccacaggcagaggtgcctctccctgtggccagtactaccactggtccacagggaatctgcctggccactgctgatgttcacttaaagcttaagggctgttcagttgtgttgtggtgaatgctgccaggcctgggactcttcaaggaagtgggcacccctctgccctggggaagatccaaatatgctttccaggagccaaagcctggacttggggaccccaagagcatgcttgttgctctactccacgtggccaaactggtaccaaaggtgcaagacaaagtcccctttactttttcctctgtttctgtcaaacagaaggagtctttcactgtagccaccacaactaggaatgtgctggatcacacctgaagtcagcacatctcagaacctaaggcccacagtatactacctggatatcactgctggttatttggtgcccaagggctctttagtcagcaggtgattaatcttgccaagactgggtccttcccaccaaggcaatgggttttctatttgtccagggtgtgtctagaaatgtcatccatgagctagggcctggaatgcgggcctcatgactctactcaatgccctatcctactgtggctgagctggtatccaagatgcaagacaaagtcctctttactcttttctctcctctccttaagcagaaggaaggagtgacttttgttgctgcaagcttcactgcctgggattaggggaggggtggcacaagcactcccttagctgccccagctgatgacttcctaggtcatgtgccacccctatccctctggttctgagcccagcccagcactaggagttacctaggaattgcaatccttgtgtcctagactgtctttcaagtttacctagaacctcagagcacttaagcatatagtggtgaggcttgctgagttctgactgctgggatgagtgattcgcctctggccaggcctgttccaaaatctcccttcatgtgcagctgctggctgagtccagcacagtgttgttccctgctacgacagcaccgagtttaatgtaaagttccccagttgctgtgctttacttcctccaagtgcgcagactccccacgttgctcagctgctgctgggggatatgggaggggtgatggtggtgatcccagagtgtctctccaaccctcttcaatgcctcttttagtgatacgttgttaaatctaggtactacgattgctcacctgatgtttggtttttgtaatgacgcttttccgtgtgcagatagttgttacaatttggtgttcatgtggcgggggaggggggggatggtgtaggcttctgttccactatcttgctccacctcaatagtctgatgtgcagaagctctttagtttaattaggccccatttgccaatttttgtttttgctgcaagagcgtttggcatctttgtcatgaaatctttgccagggcctatgcccagaatgatattttctaggttttattctacggtttgtatagttttaggttttacatttaactctttaatccatctcaggctgatttttgttcatgctgaaaggaaggggtccagttttcagtcttctgcatatggttagctagttatcccagcaatattgagtaggaagtcctttctccattgcttgtttttgttgaagatcagataattgtaggtgtgcagctttatttctgggttctctaacctgtcccattggtctatgtgtctgtttttgtattagtaccatgttgttttggttactgtagccttgcagtatagttgaagttgggtagtgtgatgtccttcttgttctttttgcttaggattgctttgactatttgggctcttttttttttccatatgaatgttaggatagtttgtttttctaattctatgaaaaataatattggtagtttgataggaacatcattgaatctgtgaattgctttggacagtatggttatcttaacaatgttgtttcttcctacccatgagcgtggaaggtctttccatttgttttatcatctctgatttctttcagtagtgttttataattctttttatagagatctttcacatccttgattagccatattcctaggtattttctttttgtgtatgtctattgtaaatggcattgtgttcttgatttggccctcagcttggatgttgttggtgtacagaaatgctgatttttgtacattgattttgtatgctgaaactttgctggaggttttatcagatgtaggagctttttggcagagaatatagggttttctaggtataaaattatattgtctgctaagagagataggttgacttcctctctgcctatttggatgccttttatttctttctcttgcctgatttctctggccaggacttccagtaggatgttgaataggagtggtgacagtgggcatccttgtcttattccaagtctcaaggggaatgctttggatggtaccaatccttttaaacttattgaggattgttttagataatgttccatgtgcaattgagaagaatgtatattatgctgctattggctatatgttctatagatgttgctatgatatgaatgtttgtgttccccaaattcataaattgaaacctaattctcatgttgatggtatgaagaggtgagacctttcaaacataattaagtcatgagggcagagccctcatgaatgggattggtgcccttataaaagaggcccagagaggtgccttgcctctttcaccatgtgaggacacagcaaaaatgtgacatccatgaaccaaaaagtggccccctccccagacactaaatctgctggtgcctgaatcatgaactttcaagcctctagaacagtgaaaaataaatctctcttgtttattaactacacagcatatggcattttgttataatatcctgaacagactaagacagatatcgtttaggttagttggtttttagtgttgttcacatctttcatttcctagtgatcttctgcctagttgttgtccattattggaagtggagtattaaagtctccagttatgactattgaattgtctatttctcccttcatttctgccagtttttgcttcatgtgttttggggctctattattagatgcaagtatgtttttagttgctatatcttcctgattggtccttttgtcattataaaatgtccttcttgatttctagtaacactttttgtcttgtctgttttgtctgatattagtgtagtcactccagctatcttgtggttgctgtttgtacaatatatgttttcccattcttttactttcaatctgtttgtatctttgaatctaaaagtgtctcctgcagacaacacatagttggatgttgttttcctaaaaactctagactgacaattctgccttttgattgggttctttaatgtattcacatgatgttactattgatatatttggatttatgtttgttattttactcctttttctatatgttttaattctctttttttcctatacttttcatttactgatttatattaagtgaatattttagaatgtaacatggtaatttttaaaataaattttaaactgtatcttttgagttattttcacagtagtttctctagagtttaccatatatattttagcttattggtatctgcttcagatttatattaacttaattctagtgagatataaatatgttacttctagatagctttatttctcttctgccttttgtattactgttacacatattacatcttgtggtggattgaattgtgggcctcaaaaatatatgtccacatagtaacctttggaacctgtgacctcatttggaaataagtctttgaagacataattatattagagatttggggatgaaattaccctaaattttcaggtgggggctaattccagtgaaaagtttgttttgttttttaaataagagatagaagatggaaaacagacacagaggaaaaggccatgcgaagatggagacagagattggagtgatgtcaacagccaccaacacctggaaaaggcagaaacagattctccgtagagcctctaaagggagtgcaaccttgccaacatcttgagttttaattctcctctccaaacctgggagaaaaactgtcttaagcaacccagtgtgtagtaatttgtcacagcagccacagaaaaccaatgcacatttatagtattatatacccaacaatacatcgctataataattattactttatgtaatcttatattttttagaggcactaagagaaaaaaggagaaaattatatatttatggcatttcttatttgtcattgctagttctattcatttattcttgtggattcatattaccatctggtgtctttttttaatcagatacagctgttctcccacacacctcttttatactgtaattgacaaatttgttatatttctgtatgtttttggtccaacaatagagttctacatactgttttatgcaattcgttagactcaggttttctatttcaccttcgaagtgtggcccttaggccaggagcagtggctcacgcctgtaatcccagcactttgggaggccgaggcggatggatcacaaggtcaagagattgagaccatccttgccaacatggtgaaaccccatctctactaaaaatacaaacattagcttggcatggtggtgtgcgcctgcagtcccagctactcaggaggctgaggcaggagaattgcttacacctgggaggtggaggttgcagggaaccaagatcacgccactgcactccagcctggcgacggagcaagaccaaatctaaaaaaaaaaaaaaaaacaaacaaactgtggcccttagaacttaaagtcatattttggttctcaaatcagttccaagagtaggtgatctagccctttcattctaaacactacacatgtagtactagagtataatattgtatttgcttattttttcagagtcagggtcttgctatgttttctagactggggtgcagtggggcaatcatagctcactctaaccttgaactcttgggctcaagagaatcctcctgcctcagtctcctaagtagctaggactacaggtgcacaccactacacccagctaatgcattttttttttaacacacataaagcacagttttttcacaatagattgacaacgataattcacgtcttttttgctagatgatattaagccacagatcaaaaagtcctagacttttatacttacttgaaaaaaacctcaaatttgctgaatgccattgtattaagagctaatctgtctggtccaatcacataatatatttgcctatattcaagtttcatatttctacatatttgataaacattcacactagattttcctctgtgctgcagacaaaaattttcttcaatggtgtctgaaaagggaggcctgcaaccactaccaaaccactctacctgagattagtttattagatagtgcctaacctgaaataaaaatctgctgatagaacattctgcaaaaaaagctctattatgttatagtagagctcatactatattatggtttcaaaggtaataagaaaaatatcatcagatcatcattatggtagctattttaagggaacttaataaaaatttaacagttatcatcaaacactggccacctcaattttaaacagtaaacacacgaattactcccataaaaattataagcataacaggacacttcttggctactattcaatactgacttggatgttctagataacacaagataagatacatgtgtgaatatctatacacatatagacatatttatagatgtgtgtgtatatatacagtatatatataagattttagaaaggaggataaatatatattacatgataaaacttatagtcaatataattttacacttgtaaaatcccagaaaaccaaaggaaaaaatagaactaaaaaagagttcaatgaaatgattagtttaaaaaaataaatataaaaaatgtaattttcccacataccttcaaaatgtagcaatcccactaagcaaaaagtggtatttctaccaactatagataaatgaaaattcacctttaaatgtctcttatcctccatgaaactcatcaaaaacaacaaaaagtacagcagacaaaaaaaaagtcttatctttaatgaaactttgtaaaacatttgaacctcaaccatgatgtgtatgaagataagttactaagtgccatgaagattggaccaagatatgaaaatgctaggagaggatacctttcactgaagatcttggaaagggttggtatattggtattttctagagtagtgattctcactgagatgcaaaaccaaagactccttgttttggattaaaaagatctaggtacagaggctgagggcagaactctctcattatcctatttgtcaacacaaaataggagagaaggcaggactaaatctgagagtgagcagatgcaccattatttcaagattgaacctaaggatgtggcaaggtaaggagaaaagtcaggatgacaagttgccctgtagccgccagttctcatcagttgaagatatattaaaactatggtacacataagccactccatcaaacagtaaatatggctatactgcaagcagtaaaaaagtgaacaggctctgcttccatacagtcaagaacaaaaagaaacacttgacaaggttgagaaaaataaatggaaaaaaataaagaatttaaaagaactggagagaaaactgtagctttggaatacagaaaaaggagatacagcatactgctaatagatgtcctcaaagagaccaaatacatagacaaggggaaaaaatccaaagacatcattcaagaaaaaattttgagatacaaataaacttcagacttttacttccagcaatggaaatccagtttgtcttcagccagtggcatatctcagacaataggcaagccatgagaatggttgttggactgcagtttcggactctattactacatgtatagtatttagaataaaagagctaggtctcctcatgtcagcacttatttgaccaatgggagtatgattttaagtttttagggtcacactttgaaggtggaatataaaaaaaattatagaaagataaatttttgttcagatgcatctactgcagcaatttgggaggctaaggtgaaaggatcgtttgagcccagaagtttgagaccagctgggcaacatagtgagaccttgtctctacaaaaaattaaaaattagctgggcgtgggggcgcttggcctagaagttcaaggacagtttgggcaacatagtgggaccctatctttataaaatatttttaaaaattagttgggcatggtggtgtgtgcctataatcctggctacttgggaggctggggtgggaggatcacctgagcccagagaggtaggggctgcagtgagccatcttcacaccactgcactccagcctggatgatgaagtgagattctgtcccaaaaaaaggacaaaatgaaatatcagcaatgaaaggtcctgctaaagagaaggtttgttaattcataattttaatgtttatctggtcatcttatccaaaaggcaaaaatctttagcctcccttatctttgggatatcgttctctcttaaatgttgctttctcacaaatcccaatttacttgaataagaatgcaatgttatgccaaaagttagggaggcatatggtgggacaaatcctactgggtggatggtttcttcattcttttcacaaatgaaatcttctgaaaatagacgtcagtggcagtttaaatagagaaatgggaaaaagggaagccaaaaatctgagaagcgtgtgaaagaggaggagtttctgtgaagatttcccatactgttctctgtatgcatttttccttttttcctcacgccctaatctatacccacacatactatccctctaggtgcagctcagaattcctaaacctggtataattggaggcatggctgcagacctaaaagttcggtacatctttacagttgtatttcatctgtttaaggcagaaagaataaattttcattccaaagcagttagcttgcttagcagcattaatttaaaatgaagaaatgcacatcctaatctctggcactgaagcagaaaattagttttggtttagaaatttggtgaagaataagttcaatttttatgggctgttttgcatcctggtgagatctaatgaggtctgtacttgtgactacctaataggctgacatgtttcctcctttaattttatctgagacttggtgtcaatgattttttggtttcttaattcaaaaaggcaaactagccaaggggtatttactacttatattgccttatatcacagtgtgccctttctagttccctagaagagataacgaatgggtttgtgtgtttagggaggtaactggtttttagtggaacactggcattatcaatcccactcttagtgttaaaaagagaatgcccgagctacccctctccccaccattttaatcagcaatttttaaatgttttcaaatattatagaaatatgcaggctgatgccaggtgcggtggcatggggctcacacctgtaatcccagcactttgggaggccgaggcaggccaatcacttgaggtcaggagttcgagaccagcttgtgcaacatggcgaaacctcacctctaataaaaatacaaaaattaaccgagcatggtggtgcgcgcttgtagtcctagctacttaggaggctgaggcaagagaatcgcttgaacctgggagggggaggttgcagggagctcagatcgtgccactgcactccagcctgggtgacagagcaagaacctgtctcaaaaaaaaaaataaaataaaataaaataaaataaaataaaataaaaagttaaaaaaaaaatgcaaggtgagtgcagtggctcatgtctgtaatcctagcactttaggaggctgagataagatgggaggatcgcttgagcccagaagtttgagaccagactgggcaacaaagcaacacgctcatctggaaaggaaggaaggaaggaaggaaggagggaaggaaggaaggaaaaaaaatttcaaacatacacaaaagttgagagaattgtgtaattgaccccaatgtaccatcacccagcttcaataattatcgatacttttaggcaggtttctaccagaaaatatgtcctggaaactttaattcttgatctgtgttcagattttgcctttcaaatgtttcattattggggctttggacatattgcacctgtattaaaagaaggatttgagtgaggaatttagtgcttcatagtcaatagtcaatgagtctccttttggctcgcctccttcttagggaaaggaactggttgtagggtgttaggcagaatttgggtgtatctgttgtggctcagagatgtttctcatagaactgatcactgtcccaatatccacgcaaaagaccaaattaaaagcgaggagaaatacctaatgtaaatgacaagttaatgggtgcagcacaccaacatggcgcatgtatacatatgtaacaaacctgcacgttgtgcacatgtaccctagaacttaaagtataataataataataataataataataataataataaagcgagggtgggtatctagcctattcttatcctgcctcatggtgttttctaaatatttacagaaagaaaatttacagagtagtttcctggtcaaactctaatgagtatctcagtactttcccctccacttctcacgtcttctttggggacgggtcgtcaagtctttgagtttctagttattgctattgactggtttataacctcctctttcacccagatcgtcaagggccgtttgcaaagcactcccaagtagagcctcttggagaaggagaaactgctatcacgcaaaaaaaaagccttgagctcgctggctccgctgcctcgaaaagccagagtccggaggcagtttgatgcggacactattccccaaccttcttcccctccttgtcgtctctattgccctcttggcagctcctgggatacaagagggtgcaggacagacttcaacccgcagcaggatccagcgcggaaagctctgcagcaggatccagcgcggaaagccccccgcagcacttctttcggggggctcctgtttccttaagcctagaaggtgtggtcgctcacgttcaccgtcccgcctctcgccgcctccgctcggcagctccacgctgagtcccgccctctccgccggagaggtgcgccggggtcagagcgccgggacccgacgcgcggctcccaaagggcggcaggaagagcccagctgggctcagccacagttatcagcaatctgcgggcagaggatgtggaggttaagatctgggcagcctcagggcgttgtcctagaaaacaccgtttaaggagagaagtgttagtgtctcggggcgtctcccaggctccgccctgcgcccgcagccagcgtggtggtcgagaccccagcccgctgctactggagacagcacctctcgcgcccgggcgggcggcctcgtctctgcacccctaggcggcgctgcgctcctcaacacccggccggctccgctttcccagacggctgcccagcctccagcctagcaagcccggctcccagctggccagccccggcaatgccggcgttcgggaggcgcaacgtcggcggtcgctgagtatccagcccgcagcagtgacggccggcaggagcgtgctcttccccgcggctcgtgctctccaggagtccggagcatggtcctgggtcaccgttggtgtagcgtgttggtggaacgtggacgcctagagggaggatggtgggctgtggggtggcagttttatgtttgtgggtttcctgcggcgctgcagcgggacagctcgagtactcagtgccggaggagacggagcggggcgtagccgtaggcaatctctccgcggacttgaggctgccagcggccgctatgtcctcgcggaactttcgcttcctttccagccaccgcgagctctacttcggggtggatctacccagcggcaatttggtggtcagagagccggcggaccgcgaacagctgtgcagggccaaagctgcctgcgtcttgacctacgacctggtgctcgaggacccgctggagctgcacaagattcggattcacgtcctggacaccaatgacaactcacctctctttcctgccggcgacgtgcagctgcacatccccgagttcctgacgcccggagcccgctttactctcccgaatgcccaagatgacgacgagggaagcaatgggatactaagctacagcctaagccccagtcagcactttcgcctggacatgggatcgcgggttgacggcagcgaatacccggagttggtgttggagaaagcactggatcgcgaacagcgcgccacccacctgctggtgcttacagctcgggacggcgggctacctgcccgctcaggagacgcacaagtcaccatcattgtggtggacacaaatgacaacgcgcctgtatttgagcgctccgtataccgcaccaaggttccagagactgcacccaatgggactgtgttattccgagttcaagccttggatccagatgaagggtccaatggggaagtccagtactccctaagcaacagcacgcaagcagagctgcgacaccgctttcacgtgcaccctaaaagtggggaggtgcaagtagctgcttcactaggtccgcctgaaacgctcttggaggcatacattgaggcgagggacgaaggtgtctttggtttagctagcaccgctaaactgctggtggaggtgactgacgtgaacgatcatgcccccgaactggacttcctgactctttcgaacccagtacctgaggacgctgcccctggcacagtgattgctctctttagtgtaaaggatgaagacctcgattctaatggtagggtcatttgtggcatgtctagtgcaggcccttttcagctgacggcttcctttgacaactactacagcctgctgattgatgggcccctggaccgggagcagatcagtgaataccaagtcctgatcacggcctcagatagtggctcacccccacttagcacccgaaggacaatcactgtgtcagttgctgatgtgaatgacaatacaccaaactttcctcaaccccagcaggaacttttcgttgctgaaaacaatggccctggggcctctctaggccgagtgtttgcccaggaccccgacctggggaagaatggccttgtctcttatgagctgttggatgttatctctgaagggccatcagcctctagcttgctggcagtggaatcatccagtggggccatcactgccaaaacttcctttgactttgagcagctcagggggtttcatttccaagtagaaggccgggatggtggcattcctcccagaagtgcaacagtgactataaacttgtttgtggtagataggaatgacaattatccggttatcttgtttcccttgcccagaaatggttctgtcccagtggaaattgtgccccgctctgccaggactggacacttggtcacaaaagtggtagcagaggatgctgacagtggttctaatgcctggctttcctaccacatctcccgggcgtctgactctagtctctttagaatttcagccaatataggtgagctccgtactgctcgcttagttcttcccactgatgcagttaagcagagggtggtggtagtggttcgggaccatggagacccaccactttcctcctctgtcactctgggtgtgctgttgagcaactctgtccctcagttacttccagactttgaagatgtctgggaaccaggagggcagctttctgcccagaacttgtatttagtaattgccttggcttgtatttcctttttatttctggggtgcttacttttcttcgtgtgtaccaagttgcaccagagcccaggctgttgcgctcagagctgctgtcgctctacagaggatctgaggtatggaagtaagatggtttcaaatccttgcatgacatcagccaccatagatgtcactacagttgagagactttctcagacttatctctatcgggcctctctgggacttggttctgataataacagtttgctgttgcgtggggagtacaatgctgccgacctgcgaaatcttgccactggggtaggactgaatttgccaatatcctgtattcagattcggaataggaaaggggatcacgctaatgtcaatgccatggtaagcaaattttatggaatttgattcctttggcccggagatggctgctagctgtgttttgaaatatttcttagacaagcctttcacaacatttcatcaattgaactaaacactccttcttagcacttcctgtgccaagaaatctggaagtatagaagtattagaagattgccctaggcctcaagggacttatagtttatttttgagaaacaagggcaaaaattaaaacctatttaagaacaataaaagtaatatgacataaaggtctaaaattaaaaataaaataccaaaatattttataagcaacagatgtgtaaggcactctaatatttaaagtgaagaatgaaaaatatgtaagagtctgctttatatgaatataatatggaaggtgaaacatttacttaaactattgcaatgcattattaaaagatgacgataaccacaaaagatgtaaaaataaattacaatgggggttaaaagaagggagaaagggaacataagagaacatttgagtgaggaggaaggagtcagagaaggctttgtgatagagatcacagatttagttggatctttaatacgatataccatttaataaaaaacagtgtattctctagcctatacttttaatgaataccattttggtgaaggtgtcttctttgggaatgacaccctaaaacatagctgatagctccatagcagtgttttgtaactgctttggagtttttgcttacacaaaaactgtaagcctctctcataacatctatttatactgataggagatcatattgttggatataggacttgacaaccttttgttttgtgtttctattgataatattttacaaagaggaaagatgagtaatttttatgtcagaaatatttatgtgttcaaaggtgcacttaccatccaaagtccattcaacttggatttaatttcttttattttaggggacaaatacacttaacaaataagtaaatatcatatttgagagtaatgtatctaatgaaagttaagtgattcaaatatttcaatttatctgttagtggcccttggcatttcaaaacttcttttttttttttgagacaggggtctcactatgttgcccaggctggtctcaaactcctagcctcaagtgatcctcccacctaggcctcccaaagtgctgggattacaggcatgagccactgcagctggccctcaaacttcttgagtgcagttaggacaacattttgaagcaattctacggtattactttttgacttctcatagaaatcctagatgcaagagaaggaggtgtgtagaaattaaggaaggaaaatgaagcattccttgttttactattctaggcaataaggggaaaagtggcttgtaagttattcttcctcaagtaatgatgttaactgcaaataaaataaatttacatatgttaaaattttctgtacttaatattttcacaatataatagaatccagcatataagatatgcttagtaaatgctgactgaatgaataaatatgtgcatatatgaattggatggtaacactgttcaacacagagggaaaaactttaacttacttttctactttagatgtgtatatgtggttaacagtttaaaggtcactttcaaatgtactgtttcaatgattattttcttcctcatgacctacactaataacataacagaggaattttctgattgtagagctagcaagaaaaacttcaatgctgtgtctgggactaagtatgagtccagttctacagatgacaaaggaattaataggtatgcacatcattacattgtgatatttgcagtggatactatttaatagaatctcagttaattttagggaaggaaattggtgcactacaatgctagtatttcaggtatcagagcacttaatatgtgaacacttttcctaccaagaaatttcactatttatttcttttattttcattgctttctgtaacaaaaagagaggagaataccagtaatggctgtaaagtttgggagtgaggaattttttttagaaacacattttcactagactagaaaggaaacataagtaagcgataggaaggctgatgaatctagaagttagaaggaaaattagctatttaaaaggaaaaatataggaatgacagaggaaaaaacaacccttcaaaccaaatttttaaacatatatgaatgattaacaaaataatagagatatactgttcatatgtgcaggaatattgtaccatcccattcattcagttgaacagtctttttccatcattgttgatattttgctttttaggtagctcattggtctgctaataattgttgtgggctggatatttccttataaataaatgaattgtgattcataaaaccatgaataaaataacttctataaatatggggtatttgtaattcacaaaggcatttgttatttacttcttcctgttcaattacctattgatctgatcttaattctttagaaaagaattcttgtcatagtatcctgaatgccttaataacaacaggattctagaaataaaatatttattgctttcattttatttcaaatcatttgaaaagcatgacatttaacaatgattataatgtgtgtctgagtcttacagaatcatgttgatgcatatgtgtttatattttgctcaaattctaagttctttcattttagtttacggtaagtttacagtatatattaacatagcctgtaatactaaaaattatcagtttaagaaattcaggaaaacatggtttttatctctgtatttccaattgataatatttaagatataaacaaaattgattcactgattgtataacaattagacaatgtgtacctcatgtccatttttttctgttaatattcttgatgggcaatttaaattttttagaatggtatctaagagggtacctctgagatataaatttctacttattaaaaactgcattgacaatttttaaaggtataaatatattaatgtagcaaaaatgcatgaaacacttaccatacaactggccttattaaatttccacatgaaagttatacatagtttcaacataccaatgttatattagtgtattgttcacctggaattaaagcatcttcttttttgccagggtatataggaaataggatatctcctctttgcaatgtcatttgttaacagtagtagaatgtttgtggcattcaaggtgctttatttaacatacattccacaagtagactttcccatagggtaattagatgttttgtatatctattttgactttgaagctgataaccacactaaaaaactttagaatgatgaaactaaggaagtttgcatgacatatgaaatatattcaaattaaaaaactcatatagacaacacaataatattgtataatatagaccctcaaatcagtaaaaaggaaagaaaaagaacattataatttgagtggacataagagaaaagcaataccttggaaacatataagtgggaaagtattgacaatgtgtctcataatgttaatgacttattgtcttttgttgtcttcaatattttcagttagagggaaacaataatatttcaacaactaaattaacttagctaggttggaatgaaggtggactaaattgctgaaaggtttttacaatgctcaaatgcatgtcatatgaatatcggaaatattaacacttggcagaacttcaagtgaatatggattacagtccaggatcctgactaaagtattatgggaagtaaggaatttgttggtaaaggttgttcttaagaaacaaagctaaataataaaggtagatagccactcattttgttcccaattttaattgatggcataagataatggttcaggatataaataaattacatgtctgttatattgcatttatgaaaaagaaaggactataaacacaaaaggttattatatattcatttggaacttgttttggaatctggaaataaatatgcaatctcgtattctcctgtgctgtagagaaagataaacactttatttctaacccatcccaaattccttggctgttcctagagccatctggttaccatctacagatattctgtgttcataggggcactctaatgacataccttcaaaatatactctgaattcaaacacattatggttattctttagaattgttaagcaaagactacagctgttttgtttaaactcaaaataatgttaatataaaataaaaaccaattaagaagtcttaatagtgggtttttaggttgatttgtctttttcttttcttattaggttaggctggccctgttaaacaagttggaaatcctgtctctctctctgtctctctcacattttttttcctattcctcggacacatttactgagattggtgatacagctttcttaaatatttggtagaattcactagtgaagctctctgtacctacagttttctttgtaggaaaattttaattgagatcaaatttctttgtatttttattgctcctatttcattcctgtacctttaattttttcagatatatgttagttttatctgtacttttgaatattttggcataaagttgtttataatgtcctgttgtgactttttttcacatctgcaggatctgtagtgatgtttcccttttcaatcctggtgttagtgtcacctctcatttttcttgactagacttggaagtagtttattaatgatattagtctttccaaggctaacttttggtgttttgggttcgctttgttgtatgtttgctttctattttattaattttcatactttattaatttatttccttccttatatgtttatatttcagtgtgcaacagaagtactctaaacatacttttcatttctatttcctcacacaaaatgtttaaaagatttgtacttaattgtggagatttatcaaaattaataataatcagtgcttcatcaagggcattcttactggtatttttcttactgcaaatgtccaatcatgaatgtaataaccaccagtacagtgtggagccactgctttgactccttctgtggttctatggtggccagctttacccaccaatgcttttgcattatcaatgcaagtgtaaatatagtgaaaaatgcaaataatgttttaacattattttgaaaattatattcacctcataaacacccaaagggtccatagaccacacttcgagagctaccgttctaattctatcatttcttcttttttttaattaattgtaacatttctgtaatgggtcttcaactatttgattagcctgaggtacagttcacacaggaaaggcaggataaatgtttgattcttcccctttgtttagcagtattcaaaacaatgaattgattcctggccatcttacaaaaaggaccaaggccttttttaggtgtcattatgaactcattgacttaaacatatttgatatggcccaatccatgtcaattatctttttaatgatcaaattatgctaactttggcaagttgggaactgttcagctttgctcctgagtctttgtgagtgtgtttgtgtatcttgttttaaaccttttattttggaataattatggattcacataaagttacaaaactagtatagagagatcccatgtgcttgtcacccacttttccccagtgataacaccctgaatccttttcatgtgagtcttaatagtcttttgaatgcttccttgatttctggtattacaagatgttcagattatcttgtacatttcctttcccagaatcagccatttttcaaagagctttcacttatttttagtgaaagatgatacttagagatataatctcaacaacaggtgtgcttattgctgctgggtcagttgctgtttctaggtatcttcagctactgagctaagggatgtctattttttaaaagataaaatacatcacatgtttatactaatctaataaagttcagcactccgaggtttttacttaacttcatcaatcttacattcctatttctcccatacgtcaaatcccagttttcattaacgtcaacagaattactcatttgttatcccacgggactcaaacaatggacttagaaaacaatttcagcactacagaaataatatgatactgtagcagtttaagtttttgtcattcttttcatttataaggcacatccttacaaatgcccagtaggcatgtacagtcaaattattgtgttttaaagtatcttggaaaagttcctctctgtgtagttaagccaccagctagatacagagctaggcttttttcaagtcgctttcaaatttagggcttgctttttaaattttaattttcttttataattatgtgaaatatttacatggctccaaaataaacttataaaacaaaatatatttagagaagtctagtatctattattccatacaatacacattcttccccactttgagttttttcacttaaaaatataaacgagattatttcatagtagtatagtatttacacatattccatactgcttaatggtgtcttttgattagcaattaatgagctccaatttatcaatattatcttttttttttttttttgagacagattctcattctgttgcccaggctggagtaaagtggtacaatcttggctcactgcaatctctgcctcccgggttcaagcgattctcccacctcagcctcccgagtagcggggattacaggcacccaccaccacacccggctaatttttatacttttagtagagacagggtttcaccatgttggccaggctggtctcgaactcctgaccttaagtgatctgcccgccttggcctcctaaagtgctgggattagaggcctaaaccaccacgcccagccaaagttgtcttttttatttagtattctttctatccttttaaagaaaacatatcctgcttcaagtcatgaagatatattcctgtgttttcttctataacattgctatccaatagaactttctgacatgctataaattttctctatctgcatatatggaatgtgtagctactgagcacttgaaatgtggctagtgaaactgggctactcaatttttaatgttactaattttaattaatttaagcttaaataaccacatctgtttagtggttgctgtagttctggaagctttcttgttttaacttgcacatttagatcttaaattacctgaaattgcttttgaatatagtgcaatgtagaagtcaagatttatattttccacttgtaaatccagttagattgcctactttcctcgctgctactgtgcagtgctacctttgtcataagcaacgtgactttatatattctgtttctggactgtctattctgtttcattggtcaacttgtctattcttgtgccaatacattctgtgttaaatatagtaacttttcatttgtattgatatctaattgtgtaagttctctcactttgttattctgcttcaagattaacttagctatttttggccctttgcatttctatataaattgtagattcagcttctcagtttctattttaaaaaaccctgctttgattttaattggcactatattgaatctgtagaaaatatggggtatattgaaaatatcttattttgatctttattgaatctataaaaatatgaagcttgttaacattgacaatattgagacagacaaccgattaacaaggtatattcttccatttatcttttttttttttttttgagacggagtctcgctctgtcgcccaggctggagtgcagtggcgcagtctcggctcactgcaagctccgcctcccgggttcatgccattctcctgcctcagcctcccgagtagctgggactacaggcgcccgccaccatgcccggctaattttttgtattttttgtagagacggggtttcaccgtgttagccaggatggtctcgatctcctgacctcgtgattcacccgcttcggcctcccaaagtgctgggattacaggcgtgagccaccgcgcccggcttcttccatttattttattattttatcttaatgtttatgtgtgtgtatgtgtatataggggtattgcacaacttttattagatagctgatattttaatgctattttaaaagtttaattttataatacaaaaattagctggacatgttggcacatacccgtaatcccagctactcaggaggctgaggcaggagaattgcttgaacctgcgaggcagaggttgcagtgagctgggatcgcgtcactgcactctagcctgggcaacagagtgatactccatctaaaaagaaaaagaaaggcagggcatggtggctcacgcctgtaatcccagcactttgggaggctgaggcaggcggatcacgaggtcaggagatcaagaccatcctggctaacacggtgaaaccccgtctctactaaaaatacaaaaaattagtcgggcgtggtggcgggcgtatgtagtcccagctactcgggaagctgaggcaggagaatggcatgaacctggaaggcggaacttggagtgagccgagatcgcgccactgcactccagcctgggcgacagagtgagactccgtctcaaaaaaaaaaaaaaaagtttaatttgataattggcttttgttgaaagtatatagaaataatactgattttatgttaactttgtatccaatgttcttgctaaatagtaaaatctcatatttttatattttgggttttctacatatactgtcatgctattcccaaataatgttagttttattattgtattttttactttctctctttttttaaaaaaatagagatagagtctcactacattgcccaggctagtctggagctcctgggctcaagcaatcctcccacgccagcctcccaaagtgctgggattacaggcataggccaccatgcctggtcttttaaaaactttctaatcacatagttttcttgctttctgtcattgcctatgaaattcagtataaaattgaatagaagtaatgttaatggataatcttgtcttattcctggtctcagagaggaagtttttaaatatttaatatgaaatacattgtttgattgggtttatttgcaaaaatcctttatcagatttattaagttccctttgttttttaatttattatgttttttaaaaatcatgaataggcattgaatttatcacatattttctgttattgaatggataatatggatttttatccttttattaatagcatgcattatattggttgatttgttaatgataaaccaatcttgcattcttggaataaactcaggttgcttatgatgtataatccttctttatatcattagacttagtttcctaacattttctttacagtttttaaatatatgtttatgatagaaacgcgtttctacagaaaaaaataattatttttaaaggcatagttattgggtactagacttagtacctgaatgatgaaataatcggtaccacaaacccctgtgacatgagtttgcgttataacaaacctgcccatgtacccctgaacttaaaagttaagaagcaacacacacacacacagatgcgcacacacacacacgcacaagaaattggcttttaactttccattcttataatgctctagtcggagtttggcatcaaggctatcctggctttatatagtaagttaagaagtgttacttttcttttacttattcggaagagttgtcttagtccatttgggctgctatatcaaaatagcataaactgggtggcttaaaaacaatagaaatttatttttcacaattctggaagctggaaagttgatgatcaaggtcctggcagatttgtgtctggtaatggcccactccctggttcataaaacagaatgtcaccttcttgctgtctcttcaccttctggaaggagcaaggtagctctctggaacctcttttatgagagctgtgccctcgtgatctaatcatctctacaaaagccctacctcctaatatcataatcttaggggttagcatttcaacttatgattgcaaaggaggagggaacacaaacattcagatcatagcaagtttgtgtaaatcagcatttttttcttccataagcatttgaagaattaagagtgaaatttataggcctagaattctcttcatgagaatgttaattataaattcaatgtctataacattaatagttatagaattatacagagcctctatttcttgttgtattagtttggttaatcaaaatggaaaattttaacataccttgctcaaaaacagaacaaggagacaaaagaaaatcaataagggtactgaaaacttcaataacaggaataaccaacttgtatgtatgtgtgtgttgctggacattatcatttgtgagatacatttatattgttgtgtgtagctgtgtatcattcattgtcattatatagtatttcagggtgtgaatggtcaatttctataaatgttctgcatgttcaagaaaaagcagtattctgacattgcttgttgttgtgttctgtatatgtccattaggtcatctttgctagttgtgttgttcaaatattctgcattcttttttattctttttgtttgcttattttatcagttactgagaaaattatgttaaagtgttccacgatgaatagtgaattgtttctccttggattttgtcaattttttgtgtcatatgttttaaggctattttattttattagattcttaaccaaatataaatatgtgatatctttctgctaaattgaaacttttagcgttatgtattatttacctctatttctgctagtgataaactattatagtttttgtttgcctgaaatgtcattcttgatagatatttttacatgggtgtaaaattcaagattggcatttatttcattttggtacattaaagttacctcctcaatatcttctgggttccactgttgtctcattgtgctgcttcatcagtaatttattatctttcttccaattttactaattttgtcttcttgtgtgtccaacatgctattaaaagtattccttgagttgttaattttggttattgtgtttttcattttaaaaattataattattactgatcaagtctgccatgatattttttataggtttctgttccctgcaattttttttttcaagacaagtcttgctccgtcgctcaggcgtgatcatagctcactgcaatcttgaattcctgggctcaagtgattctcctaccttggctcccaaagtgttgggatttcaggcatgagccgctgctcctggctcctgcaaatattcttaagcttgtcatttatttatttaaatatattaaatcttcatctgataattccagagtctgaagtctgcaagtgtatacctgctgtgtgctgtttcagctggacagctccatatttttatgtgtgccaacttttatttgacttttgatggtccatatcctgaaaatgatatttgccaggatatcctgagatcttggatggaaatacctttcttcacgatagatttttatacaccttccagtgagtgaatactactgctagtaaaccactttaaatcaagttcaagacttgaagctccttggctacttagactacgtattctcagataaaaatatgcaggatatctggtatctagttacaagtttataggattaaattttcctttcctattttccttctggcctttttggtgccaagtcaaattccccagcagttttctgggctggagagtaggtgggtttagttttcacatactattactggaaagattagtcctttgaagttccagcttaatgtagtttggaggccccataagactccccatcttgaacatcctgcttctttttttttctttcttcctttctttcttcctttctttctttctttctttctttctttctttctttctttctctttctttctttctttccttccttcctttctctttctttctttctttctttttcttctttctctttttttttttttttcagatggagtcttgctctgttgcctaggctggagtgtagtgacaggattttggctcactgcaacctccgcctcccgggttcaagcaattctctgcctcagcctcgggagtagctgggattacaggcgcccaccaccacgcctggctaattttttgtatttttagtagagacgaggtttcaccatcttgaccaggctggtcttgaactcctgacctcgtgatccattcgcctcagcctcccaaagtgctgggattacagccatgagccatggtgcccagcccatcctgcttcttaatttctgtcttcctacaacttatgtccaattttatgtcaagttcaatattctgtttacctctttgggcttagctttcctccacaatttgtcctagcagttccccattatcttatcagattttcagtgcttttaagataattgttttaatgttttacccaagaatatttagttgatttcagtaggatgactgctgtaaataatttaggctgccattacctgatattccctatcatagagttctatcaccagtgactagcatctaagtaacattgaaatgcttttatgtatatcttaaaatatttgaattacttttgttttgaaaacaatagtatctttactttccctaaaccttgataagggattcatatctcttattattaattttgggaaaaaataattcataaacctggtctattatgaaatgtttgctaattgagccaagagagcacatgcattcatctaaaacattcatataatcaaactttattaaaggtgatatttgtggctttacttgacataaaacagcttccatatttctctattccagacattttatttaaaatacatttttgagcataagatatttaaaatgtgtaggcaaataagatatccatatcattaaaagatatctaaagctggtaatggtggctcatgcctgtaatcctagctacttgggaggtcgaggcacaagaatcacttgaaccagagggaggcggaggttgcagttaacggagattgcaccactgcattccagcctgggcgacagatgagactctgtttaaaaaaaaaaaagatatctaacaataaacaagtaaactatcaattataatacaatcaaattcaagctacaactgaaataaatacatggtatctaggaaactcagaggggaagcaactaactcagtatggtggggggtagggggttgaggcagaaaaatcttcccatataggatgtcacatataattatagtgtttatatttgccaattgtaaaaaaaaaaatggcaaaagagatctcattcagaaaagcaataagcacaaaagttttaggaataactttaatgagaaatatgaagtaaaagtatgaaattttgttgaaaaatattttaaaatcttgtataaatgagatggcataatgtatttttaggcagaatattacaaaggcatgttttccacaaactagttggatttggccctgtgtcaataaaaattccagtaagatgattattttgctttagcatgacaacttttttcctaaaatttatctctaagaataagcgtgaagaaaaaaaaaattgaaaaagagtttaaagtgtagacgttctgttatcagaattaaattttggggctgggtgtggtggctcatgcctgtaatcccagcactttgggaggctgaggtgggtggatcatttgaggtcaggagttcaagaacagcctgaccaacatggtgaaatcctgcctctactaaaaaatacaaaaattagccaggtgtggtagtgggtgcctgtagtcccagctactctggaggctgaggcaggaaaatcgcttgaaccctggaggtggaggctgcagtaagccaagatcatgccactgcactccagcctgggtcacagagtgagactctgtctcaaaaaaaaaaaaaaaaaaaagaaagaaagaattaaattttgggaagtcattattagcaatattgtgtagtatccattggacaggatgagagtagaggaaaggagatcattaaaatatacaggtaagaaattatggatatttaaattcagactagaggcaagggctttaatatgatataaaggatagaattgataaggctaaatgtgggagatacagtaaaataataaatagatgctatcaaggttcatggaaatgttgagttcagtatgcaaaatgtcatgtaaatagacgtagacaataatcattttaatttgttgatctgagtggggctgaattctaaatatagactttgattcatctgcataaggaagctggattatggataaaaccatctatgaacaatgtataaagtgtgaaaaaaagggataaggtcaaaatattgtggaacacatttaaaggtctgagagaatgaaagtccacagtctaaaagcagtaggagatgtaggaaaaaaactaggaagtggtcctttatgcaaagcaaaagaggaaagtttgaagaaaatgagttgattgaagttgtaagatgtcacagaagtcaagaagaggtctctgaagtgttcattggactggtcattatgatgtcatgagcactttagcatgagcagctttagaagtgtggttataggagaagcagtgaattaaagagttaaagtaattaagaaaacagagacagaactactgagtaccccccaaaagcaattatcttcaaaatatggaaaaccagattgggatacaaaaaggtttcttgttaaagataaaggaggcctgagtaagtttatatctcatgggaaaatggtaccagagaagaaaaggttgaagattagaagagttgaaaattaaagggccaaggctggttttttgttggtttgttttgttttgttttgtttttaaagagggttttactctgtcgctcaggctggagtgcagtgatgtgatcactgctcactgcagccttgacaccccgggctcaagcgatcctcctacctcagcctcctgagtagctgggattacaagcacgtgccaccacacctggctaatttttaattttttatagagatggagtctcactgtgttatccaggctggtctcgaactcctgatctgaagtggtctgcctgcctcggcctcccaaagtgctgggattacaggtatgaggcactggactgaggcttcttaaatggtggcaaggaacatattttgtgctttaaatgatttaagtatttaaagatcatagttttcctggcaacttactgtagagatcacttcagaatttccctgggtagagtagtgtgctgtagaagtatagtgttgtaagccagtgtggattgggagtccataccccttatttatctattctgtgtatcctattaataacagtaattatcaggttattttgcctttgaacaccttagtaagtctgagcatttacatggaaaaaatgctgggtttattcctcctgttattgtattttacaagtctgtcgagggtccacagtgatctttgccccataattgtaaaatgagatattagaatcatccttatttatcttaaccacctactccactgtacagttcctataattccacaaacttctctttatattggtttatgccttctttagatgattgtgaataagagtattatcttaacctctctggtgggtctacttctgtaacggttgtgggtcatgaattattttttactcagacataattatctttggtcttatataaagaaaaccctacagactccaccaaaacactcttggaactaataaacaaaataaagttgaaagataaaaaatcaacttacaaaaatcaatagcatttctatacactattgaactatctgaaaaataaatcaagaaaaccatgctatttacaatagctatgagaaaataaaaatacttaggaataaatttaaccaagaggatgaaagacctgcaagttgaaaactttaaaacattgatgaaagaaattgaagaagacacaaataaatggaaatatattttatgttcatagcttggaaaaattaatactgtttaaaatgtccatattacccaaagcaatatacaaattcaatacaattcgtatcaaaatttcaatgaagtttttacagaaatataaaaaacttccctaaaatttgcatggaaccacaaaacaccccaaatacccaaagcaatattgagcaaagtaaataaataaataaaacaaaacatacaaacaaaaaaatgaagctgaagacatcatactacctggcttcaaaatatacttcaaagctataataatcaaaacagcatggtactggcataaaagacatgtagaccaatggagcagaatacagctcccagaaataaatccacacagttactgtccactgatttgcaacaaaagtatcaagaatatacaatggaaaaaggacagcctcttcaataaatggtggtgggacaatttgatatccagatgcagaaaaatgaaactagacccttatctcacactgtatacaaaagtcaactcaaaatggattaaagacttaaacatagacctgaaattgtaaaactaacaaagaaaacacagtgggaaagatgaaagatcaataacactgatctgagcaatgatgttttttatatgaccctgaaagcacaggcaataaaagcaaaaatagactaatggattgcatcaaactaaaaagctcctgcgcagcaaagaaaacaagagtgaagggacaatccacagaatgggagaaaatatttgcaaaccacagatctgataaggagttaacataccaaatatataaggaactcaaacaactcaatagtaagaaaacaaataacacgatttaaaagatgggtaaaggatgtgaatagacatttctcaaaagaaagcacacaaatgaccaacaggtatactaaaaaatgctcaacatcatgaatcatcagaaaaatgcgaattaaaaccccaatgagatatcacctcacacctggtagaatggctattattgaaagaggaaagataacaagtgatggagaggatgtggagaaaagggaactcttgcacacggttggtaggaatgtaaattagtacaatcatagaaaacaatatggaggttactcaaaaattgagactaaaacaactatccagcaatcccactactgggtatatatccaaaggaaatgaaatcagtatgtcaaagacctatccgcactcccatgttcattgcagcattattcatgatagttcagatatagaatcaacttaggtgttcatagtggatgaatagataaagaaaatgtgaaatatatatatatatatatatacaatggaatactcatcagccattagaaagaatgaaatcctgtcattcgtgacaatatggatgaatctggaggtcattatgtttagttaaataagccaggcacagaaagacaaatactgcatgatctcattcatgtggaatgtaaaaaagctgatcttatagaagcagagagtataacagtgattaccagagatgggtagggcagtagtaaggaggagagattgaggagaggttggtcaatgggtacgaagttacaattagataggaagaataagttctggtgttttattgaacagtagagtgtagttaagaataatgtatatttcaaaatattatagaatagaggattttgagtgttctaacttcaaagaaatgataaatgtttgaggtaatggatatactaattaccctgatttgatcattacacagtgtatatatgtattgaaacatcagactgtagcccataaataggtacgtgtcaattaaaataataaaaatagtaaaatgtatagttacttccacggggtagaaaatgtggtatatattcatggtatactacacagccttaaaaaaagaaaatcctgtcatttatgacaggaaaaaaaaataagataatccaatgtaccatttgttgaaaatactttttctttttattgcattatcttgacatctttgtaaaaagtcggttgaccataaatgtgtgggcttaattctggactctatttcactcctttgatctatatgtttatcctttcactaaaagtagactgtcttgatattgtagctttataaatttgaaaatcagctgtgaaatcctccaaccttgttctacttgtaaacattgttttggctattataggtcatttaaattttcatataaattttagaatcaacttttcaatttctacaaagaattccgctgggatttatattgggaatgtttttaacatttagatcaatttagggaagatttggtatcttaacaatattgagtcatcagatcgtatgaacatatatacctccatttacttgggtctttaaaaaattgtctcagcatgttctgtagttttaagtattgaggtttcaaaagttttttgtaatacctattcttatgtattttatggtttaaaaaattctattgtaaatggattttaaacagacttttaatttgcagagactatttcttcctttccaatattaatatttgtttatttattttgtcattataatggctaggacttccaggacaatataaacagaagtggtgagagcagacattcttgccttaaccctgatcttatgagaaaagtgttccatattttacaattaagtatgtgctactcataggtttttcccaaatactttattaaatttaggaagtaccctttctggtttgctcagagttttatcatgattcattgttgaatttcatcaattttcttttaatctattgatatgagcatatgatttttcttcgttttactaatatgttggattacactaattgatttttgaatgttggaaaaaaccttccattcctagggtaaatcccacttagtcatgatatattatcttttcaaacattgttagatttaacttgtattttagtaaatatttttacatctgtgttcatgtagaatatctgtaaataattttgtaaagaatatcttttcttcttgaggggtaatgttttcattaggttttagtatttctaacctaataaaatgacttaggaggtgttccttcctctattttctgaaaggttgtgtaatattggtgttatttcttccttcagtgaaacattctgtgccagggattttcttttagggaaagtttctgataataaattcaatttctttcatagactttctattaaaaatgttaacactatttatattttatttcatgctctgtcaattttgttaagttgtattttttaaaggatttgtcagtttcattcaatttatcatatttttggcacaaagttgttaataatattctctcatcttttaacgtctgtataatctgtagtgataacatctttttcatttttgatattggtgatttgtgttctatcctcttttttatcaataagtctagctgagaatttatcaattttgctgatttttttcgaatagccagcttttggctttgttgatatattttctattgtttggtttctatttcattaatttctgcttttgtctgtattatttgccttcttatattacttcgggtttactttgctctcttttagattttaagtggattcttaggtaactgattaggtaactgacatttcttctaatataaaaaaattaaagccacgaatttattagtatgaactgctttatttgcattttactaatttttatatgtgatgtttttatttttattcatttaaaagtatgttctaatttccattatgatttaactctttcacccatttattacttaggagtgtgatcaagtttacaaatatttttggttttcctagctatcttgttgcttttgatttctaatctaattctcttttggtcagagaacatactctgcatgatttcagtcttttaaaaatctgtttagacttgttctgtggcccagcaacagtctatcttgatgaacatatcacgtgcacttgaaaagaatgtatattctgtaattgttgggtgtaatgatttataaatataaattattgttatccagattttctgtgtctttatttttttgtctagttgtcctatcaattgctcagagagcagtgttaaaaatcacctatcatcattgtgtttatctctttgtgcccatttttgcttcatgtaatttgaagccctgttattaggcacacacattgatgattattataatttcctgatttattgatccttttatcttcataaaatatcgatttgttgctggtcatactttttttcttgtagtagcttttgtgtgatattaatgtggccattctagtctcatgttttctgttttcatggcatattgctttttgttcattttacttttgtttctttaaagtatgcccttgttgaagcgtattgttggatcttgctgttttacccattttgataatatctgctttttaactgaagtgcttagcccattcacattagtgtaatatttgatatgtttagatttgtgtccttcaatacattatttgctttctatttgtcccctctgattttgttcttctgtttccgcttatctgttgtcttttgaattatttgggtattcctcagaatctcttttaatttttagatataactatttttagattttttttaatttgcattttttagtggttgctgtaaggattacagcatacatacttaacttttctcagtccacttaatagtgtacaaccttcataaaatatagaaaagttacaaccatataagactatttagctcttcctgtgccattgcttatgctatagttttcatttgtattaaatctcatacaatacaaaacccacaagacacagttataatttttgtttaagcagttattatgtactttagagaattaagaaggaaaaaaatagtcatttctgtttacctagtcatttaccatttctagtgccattaatttgttcctaaagagctgagtttatccataatgtctttttgcttcaacctgaaaaactttacttagcagtttttgtaatgcatatatgctgcagtgatttatcttagttttcctttatctgaagatctatttatcttccatttgaatgatatagaattctgggggattgacagattttattttcttccacttaaaaaaaatgttattctactgtcttctaatgctcatagtttctgatgagaagtgtgtagtcatttaagtcattattccctgtgtgcgatatgattgtttttgttgctcttgcatggctggggggacacttattttaaggttttctacttacctttggtttagaagtttgactatgatgtgcttatttatgcttttctttatttttatcctgtttatggttggctgagtttatcaaacatgtacatgtatattgttaaccaaatttgacaaatttttgttccttatatccttaaattttttaatcctaatttctctctatcctttctggactccaattacatacatatggtactttttaaatattgtctggttttaccatagtagggttaaagtttggtcctttaagactatacatttctttcatattcttgtatattctatattgttcaataggtctctgagatttattttatttttattttatttcagttctttttcttttcttcagattggatcatttctattgatctattttcagattcattgacttttgcctcttttagctccatttttcccaagatcaggcagtgagttttaatttcaaatattatatttttattgctaaaatttccattggctttcttatattttcctttttttctgataagatttcctttattttcattccttaccaataagttttcctttatcttattgaatatagttatagtagctactttaaagtcattgtccgctaattcccacatctgtgtcatctcaggtttggattcttgatggtctttacctttaggaatgcatcacatttttctggtattctatgttaggtaattttggattatatcttgatattattaatgtgttattcttgagattcatcattctgtttgtgttagtccattattgcactgttataaagaaacacccaagactcggtaatttataaagaaaagaggtttaattggctcacagttccacaggctgtaggaagcatgatgccggccatctgcttggcttctggggagccttcaagaatcatggtggaaggcaaaaggaaagcggctcatcttacatggccggtgcaggagcaagggacggggggaagtgctacgcacttttaaacaaccagatttcacgagatctctctcactgttatgagaatagcaccaagggggaaacctgccccatgatctaatcacctcccaccagggcctgcctacaaaattggggattacaatgtgacatgagctttgggcggggacacagatccaaaccatgtcattctgccactgccctcaccctccgcgaaatctcatgacgttcttacattgcaaaatacaattatcccttcccaatggtccctcaaagtctgaactcattccagcattaagccaaaagtccaaagtccaaagtctcatctgagacaaggcaactctcttctgcctatgagcctgtaaaataaaaaacaagttagttactcccaagatacagtgcgggtacaggcattgggtaaatactcctgttccaaaagggaaaaaccagccaaaagaaagaattataggccccatgcaagtccgaaatccagtagggcagttattaaatcttaaagctccaaataatcttcattgactccatgtctcacatccagggcacactcgtgtgagggatgggctcccaaggccttgggaagctccactcctgtggctttgtggggttcagttcctgcagctgctctcatgggttggtgttgaatgcctgcagcttttccaggcacagtgtgcaagctgcttagaactgctggtggattcccattctggggtcttgagggtggtggccctcttctcacagccatttcactccagcctgggcaacaagagtgaaactccatctcaaaaaaaaaaaaaaaagaaagaaagaaatttcctctgccaggtaccctaaactcatcattctcaaatttaatgttccgcagattcctacagcacaggcataatacagccaggctctttgctaaagcataaggaaagtgacatttgctccagtcctcagtaagttcctcatctccatctgagacctcctcagactggacttctttgtccatttcactatcagcacttcggtcccaatcattcaagtagtctctaggaagttctaagctctccctcatcttccctccacactattccaacctgtgcctggttacccagttccaaagtcactttcacattttcaggatctttatagcaatatcccactctcagtatcaattttctgtactagtcttttctcacactgctataaaaacacctgagactggataatttagaaagaaaagaggtttaactggctcgcagttctgcaggctgtacaggaagcatgatgctggccatctgcttgtcttctggggaggcctcaggaaacttacaatcatggtggaaggcaaaggggaatcaagctcatcttacatggcatgagcaggagcaggagcaagagagagagaagggggaagtgatacacacttttaaacaacaagatctcatgagaactctctcactattatgagaacaacattaagggggaaatccacccccatgatccaatcacctctcacaggccccatctccaacattggggattacaatttgacatgagatttgggcagggacacagatctaaaccgtatcactgttatatttctatgaagggtgttgacatttttgttttagtagagaataaacttgattagactaaaaatgcaaaatctttcttgcttctgcttggtagcagttcaaacttcagtttagttcttttagctttagcctttgctctttatatgtgattcagggacggcagagatgtgggaagaatttgatcatagaatttagggctcaccttcttttgttctgtgcactcaaggattctctacccctctcagttgtggattacagtgctgttgctcctggctcctcccctttgtccttaagctggagaaactagggattatctgtcagagttttaacttcctcatgctgtgtcacaaccttgatcagctattaggccaaagcaacaaaaacgggaaactcacttcatgctgattcttttctccaagttttagtgccctcctctcccaaaactgcctccttttgtttattccccagagtccttagatatttgctttatgtattttggccaggagctatagttgttatctctggaagggtctgtttattatgagcttactttgatctactagactgagcttcagacattgtgttttgaaatttttgcttaacattacatttatccaagaattaaatttaatatttatttatttttttcttcaacttttaagttctgaggtgcatgtgctagttgtgcaggtttgttacccaggtaaacatgtgccatggtggtttgctgcacagatcaacccatcacctaggtattaagcccagcatccattaggtattcttcctgatgctctccctcccattgctcccccaacaggccccagtgtgtgttgttccccttcatattttcatgtgtactcatcattcagctcccacacatagtgggacgatgtggtatttggttttctgttcctgcattattatgctgaggataatggcttccagctccatccatgtccctgcaaaggacaagatcttgttcctttttatggatgcatagtattccatggtgtatatgtaccacattttctttatccagtctatcattgatgggcatttgggttgatcccatgtttttgctattgtgaatagtgctgcaatgaacatacacatgcaggtatctttataataggatgatttatattcctttgggtacatacccagtaatgggattgctgcgtcaaatggtatttctgcctctagatctttgaggaatcgccacacagtctcccacaatgagtgaactaatttacaaccccaccaacagggtaaaggtgttcctttttctccatctgttgtttctggacttgttaataattgccattctgactggtgtgagaagatatttcattgtggttttgatttgcatttacctaatgatcagtgatgttgaggtttttttcatatgtttgttggctgcatgactgtcttcttttcagaagtgtctgttcatgttctttgcccactttttaatgggcttgtttgggtttttcttgtaaatttgtttaagttccttgtagactctggatattagacttttgtcagatggatagactacaaaatttttctcccattctgtaggttgtcttttcactctgatgatagtttcttttgctgtgcagaagctctttaatttaattagatctcatttgtcaatttttgcttttgttgaaattgctttaggcacttttgtcatgaaatctttgcctgtgcctatgtcctgaatggtattgcctagcttttcttctagggtttttatagtttcatacttttatgaattacgtctttaattaatcttgagttaatttttgtataagatgtaaggaaagggtccagtttcaattttctgcatatggctagccaattctcccagcaccatttattaaatagggaatcttttcctcattgcttgtttttgtcaggtttgttgaagatcagatggttgtaggtgtgtggtgttatttctgagttctctattctgttccactggtctacacgtctgtttttgtaccagtaccgtgctgttttggttactgtagttttgtggtgtatatgaagtcaatcaagtagcatgatgcctccagctttgttcttttgcttaggatcggcttggctataaaggctcttttttggttccatattgatatggtttggctgtgtccccacccaaatctcaccttgaattgtagttcccataatccccacatgttgtgagagggacccagtgggaggtaattgaatcatgggggcaattatcccatacagttctcatgatagtgagtgagttctcattaggtctgatggttttataagggctttttcctttttgcttggcacctctccttcctgccaccatgtgaagaaagacgtgtttgctttcccttccaccatgattctaagtttcttgaggcctccccagccatactgaactgtgagtcaattaaacctctttcttttataaattacccagtctcaggcagttctttatagcagtgtgagaacaaattaatacacatatgaattttaacatagttttttcgaaatctgtgatgaatgtcaatggaagtttaataggaataccattgaatctataaattactttgagcattattgccataacactgattctgtctatccatgagcatggaatgtttttctatttgtttgtgtccactgtgatttccttgagcagtggtttgtcattctccttgaagaggtccttcacttccctttttagctgtattcctaggtgttttattctctttgtagcaattgtgaatgggagttcattcataatatggctgtctacttgcttgttgtttgtgcataggaatgctagcaatttttgcacattgattttgtatcctgagactttgctgaagttgcttatcagcttaagaagcttttgggctgagacaatggggttttccagatataggatcatgtcatctgcaaacaaagataatttgatttcctctcttcctatttgaataccctttatttctttctctttcctaattgccatagccagaacttccaatactatgctgaataggagtggtgaaagagggcatccttgtcttgtgctggttttcaaggggaatgcttccaggttttgcccattcagtgtggtattggctgtgggtttatcatatatatggctcttattattttgagatatgttccttcaatacctagtttattgagcatttttaacatgaagggatgttgaattttatcgaaggccttttctgaatccattgagataatcatgtgggttttgtctttagttctgcttatgtgatgaattacatttattgatttgcatatgttgaaccagtcttgcatcccagggatgaagcctacttgatcatggtgaataagctttttgatgtgctgctggatttggtttgccagtatcttattgaggatttttgcattgatgcttatcagggatatcagctggaagttttcctttttgttgcatctctgccaggttttggtatcaggatgatgctggccttaaaggagttagggaggagtacctccttttccattgtttggaatagcttcagaagaattggtaccagctcctctttgtacctctgatagaattcagctgtaaatctgtctggtcctgggctttgtttgcttggtgggctatttattattgcttcaatttgtaatttaatatttttaaatcttgggttaaatggttgaatgaatgtgtgaaaagttagatatcaatgaatgaatattcttaaatgtataaactttaatcttgctggatataggataaaatttacattaaaacactgtaattaatcagtcaatttaagtaaaataaattcaaggaagtggtctgaatttctcagtgagcatttagatatttatgggagtcatataaaataaattataaatgtgactgagggctttttattaaggaaaatgaaatattgctatggacatgattctgtgtgtttctttactacactatgaactaaaaattttggagacaaatctaagtatataaattggtttattgatgaccgattgggaatataaataggcacaaaaatttggcgaagcattttggcatgtctacctaaaatttaaatatgtaagcactagtccccccttacctgcagtttcactctgagcagtttcagaaaataggtgagcacagtacagtaagatattttgagagagagaccacattcataaaacttttattatagtgtattgttataattgtcctaatttattattattgttgttaatcttttactgtgcctaatttataaatcacactttatcataggtatgtatgtataggaaaaaacatagtatatgtagaattcagtattatccttggtttcagacattcagtggggatcttagaaagtattctctgtggaaaaggagggactactgtacttttaacaaagcacttcccagaataaacacacagacatatacatgcacacactttcagaaatgcacttaaatattcaatcatggagtaaaaattaattatgaaatatctagacaatgaacattatgtagtttttattaagaaagaagcagaattatatatactgacatgaaaggatgttcattatatatgttaagtaaaaactaagttcatcatatatgttaagtaaaaaaaagtcacaaattaagagaaagtgttaattgatttgagagtttgtgtattttttttcctattttgtgctgaaaagctgaagttggcatcaaccaaggcatattgttatctatgtatcaagctaaataatttaaagatctttaagactattaattcagagatgctgtataaatagaatcagtgccagattttttgtttcaattctatcagccaagtatactatgctttctttgcttgtgatagaaaaaagagagaaaaaacacagaagcaaaaagtaaagttgtacaatagtgtgtagagtgtggttccattttgtaaaatgtatcagtgtgtatatttatatagcatagtcaaaagcctggagtgatataaattttctgttactggtctagtatacaagggaattagattttaaaggactttcattgtttttaacaattctgaacaaatttaatttggtacaagaagtatatattttaaatattattgaacttaattaaaataaattagagctcaaaaaataaataaatcacaggaagttcacagtctgactttatcaggaatgttgctattttcttaacaggtcatcaaacattatcactgatgcttggaaagaagcactttttataatttaaaaataccttttattcttcaacttctgctggcttaaagagcactaagtccacatatcctaggaggcatggctgtccaatatatactatgtgtacattgatttatgaaccaataaatgtttcatacacagttgagattttaaatgagcttatgataattggatcaaaggaatactagtccagcttgagagtactgcagaaaaccaatcacagaaagctatgatgaaattttaattataaaggatattgaatatcctagagtgacaactctgttataataaatgtaacactgaatgggaaagagagaaaggagatttttacccatttctgtttgaaatcaactttctatttctagtaaattatcacaccattctgttttaatttttatatcttaaagttatcattccagtgtctttggtttactgggtttataaaagaattgaccagtagctatataatagatacagaaaagtctgcctgggtgtggtggctcatacttgtaataatattatattattataattgttctattttattattagttattgttgctaatcttttactgtacctaatttatacattaagctttatcatgggtatgtatgtataggaaaaaatgcagtatatatagaattcagtattatccttggtttcggacattcagcaggggtccgaaggtgggcgaggtgagcccactttgggaggccaaagtgggcagattgcttgaccccaggagttcaggaccagtctgggcaacatggtgaaatgctgtccttacaaaaaatacaaaaattatctgggcatgatagtgcatgactgtagtcccagctacccaggagcctgaggtgggagcatcactgagcccggtggttgaagctgcaataagttttgattatgctactgcactccagcgggacaactgagtgagaccctgtctcaaaaaaaaaagtcacaaattaagataaagtgttgattgatctgagaatttgtgtatttttttctattttgtgctgaaaagctgaagttggcatcaatcaaggcatattgttatatatggatcaaactaaaaaattttaagatctttaagaccattaattcagagatgctgtataaatagaatcagtactagattttttgtttcaattctatcagccaagtataacatgcttttcttgcttgtgatagaaaaaaagagagaaaaaacacagaagcaaaattgaagaatttgtaaatcatttctaaataatttcaataaaatgagctttgaaagggaaaatttttagataacattatctcatcaaaatgccttaaagtatattttaatattcagtaagaacagtgtatattaacatggctaatttagaggatttatattttacccacatgataatgtattatgcctgtaactgctaaaggaattatgtagcaaaatctgtcaaggaatacacgagtgggatttatatcagaaaaatcaaagccatttgtaaagccccattacttaggcagaatatcataggtaggaggtagatgttactgaaagaagaagttgggatatgaaatacaaatctattttgcatcatgattttgttaagtccggctgtttattattaaaaacatgtacagaagattcaattgaagtttctaaaagagaaagaaacttgtagttgtgggaacaatagtattccttatgaaatacttagatattaatagcttgagactgataatacaattcttaagttaggggttgcatgtgtagtggtcagatgttatttcaggatctcaagaaacagagccatggtaaaaagaagcttcctggagcttctgataaattccgtcacctttttgggacccagtttcttcatcaataccaacctcattagggtcctgtgagaagtacatgaggtgagatatgtactgaaataatatgccaactcttaagtgccaagacattaggatgcaagggggggtgcccaaaaagtcaacaattacttgatactctagatatatgtatggataattttgagaagtaatccttcttacacagaggtgtaggtttgtttgttccaagcagcaaacataatgggtataggaaagagaaactgtggccttcatatagactgagcttaggaaaacagttggaaaacagttcaaattcaaggtacttcaacaatatctagtgtgtttttgaaatatatttttaaaacccctatccaaatcaatgaatgctttggctaaaacctacttgggaatgagggtgttctttagtgccaaatactcatcttattttagtccatgattttagtccatggctaaaatcccaagagttacagaggagaaatagggccaaacaaggtttctattaaaataagaggtcccaagtgatgaatggaaacttggaacaggtttaatggcaactataagccagaaattagctgaaatacacactaatgaatttggggcatatcttgagtttcagatagaaaattggtactaagtttagtgaattagaaacatagcttaacctaggcagttgcaattcttgttccaaaaatgctcaatttgctgctggactgcatggacacttgctacctccttgttttgagtcattaacaaaatgttgaatgggatatctggagtatcaagtaattgttgactttttggtcacccaacccccttgcatcttaatgtcttggcacttaagagttggcatattatttcagtacatatctaaccttatgtactcctcacaggaccctagtgaggttggtattgatgaagaaactgggtcccaaaaaggtgatggaatttatccgaagctccaggaagcttctttttaccatggctctgtttcttgaggttaaagaacatgatttaccaggctctgtttcttgagagaccaagagtggatccctgtagtccccattagaattctccttctagtttgaactattccattagtaaacactttttggcatgttatttaaacaattacaaaatcacctaactacactgtcttgcagctgcctttctttttttgtcttgtccacgtgagtatattgggagactttgtttaatgtctccacaaattctagatagactgttcctgcagcatttctttttttaaattttgttttgataagcatttattttggcaatgattctagtaaatgaaactaaagtgcccatatgaaaaacaatcttaagtctatgtggttagtttgaagttaccagtttttaattaagccggagtagtccttagtatgaatgccttcatttctaagtgctcataaacaatcactttagtaatattacagttttgaaggaatttatatcaagcttaatggcactttttaaaagataggaaattgggttctctagtcacatctgtaagttatttcagtgccttggaagatcatttatctggccacagataattgacttacttacatcagttttttttttttttgagatggagtctcgctctgttgcccaggctggagtgcagtggcatgatctcggctcactgcaacctccgcctcctgggttcacgccattgtcctgcctcagcttcccgagtagctgggactacaggcacccaccaccatgcctggctaatttttttgtattttttagtagagacggggtttcaccatgttagccaggatggtctcgatctcctaaccttggcctcggcctcccaaagtgctgggattacaggcgtgagccaccacacccggccacttatatcacttttatgcttcctatctccttattgatcttgaggttcaagtttcacttaaccattttcttcaatgaaaaataattttataatttaaaaaacctcaacctttaatattctatgattcttgttaggccatctcaattgagaatactgataaagaagtaaaactccccccaatactggctagtttgattttatctgttaatattacgcaatctgccccaaacctgtctctccctttttattgttacttatccaaagatggcttgaatctcttatggcttgaatctctttgtttattctaagcaattttcagacacctcagccaactatcaataatatattagttttttagaactaaaaatgtagaggatctccccctaaaagccaattgttaatgccaaatatttgactgatatatttcttctggaggaagggagatgtgaaaaaatttagccatcaagttatgtgaaaactttttcatcttcccatccactggatgttttatctgtaaataatgctataatcatattggaaagtattttccttctggggatgcatgaagatcaggaatcctattcgtttttaacaagatggaatttttaaaaactactttggacaactctaaacatcagagatgaccatttgtctcttttttattatataacttgtgctcggtttgtagagcaacataaatacatgaattaaaaaatgaaaactagctccttccctatttgacagatacttctcaacctcctctccataagatatgctctatccctatataggaaatttttctgtagcagcttgagtttactaaaaataagatctgaagaaaatgaagcaattaacatttattgagagtctataagggtttctacattgtgaaggagacagaaatataagacatggctcctgctttcaggttgcttataattaaagagataatattaaattatttggatgaatttaaaaatgacacatgccatcttacagatatgctgtagactgtgaaaatgaaaaaaaaaacctcgtgtttagagtagacactgtttgatggattaggtaggttttcatctggactttgaaatgtatgtaagattttataaggaggagagaaaataagaagctgtttgtattagaattacacagataaatttgtaaatttagttcttttcaaagaacattaattgagcacctctgtgccaagctccctactggatgctgtagattacagcatgtttaggaactaacttcatactctgttgctaaagtatttctgtgttttctaaaaaggtaaatctcttgtgaggaaacaaatctcttgaaggggttctcataacagaagtcccatttacttcatgatataaaaaggggctgttttctggttttgttctcaaaatgtaggatatagttctagacgtaattgggaaagcttaactttgttgcatacgcatcttccctatcatggttgatttcctatatggcatagttaaatgtgtttatccgtgtttgatatctaaagggccatgctacatatagactgccaactaaggttttatctgatgataataaattgttgtatttcatgacgacagcaacaacaacaataatgtacttaactagtcactgtgcaaattgctttacatacattttctcatgtaatcataataataaccgtatgagttttgcttactattgttttccttaattaaaatgagtaaagtgaagcttaggctaagtaacatgtccatagccaaacagttagtcactggcaggagtgtgactgactccaaagtctatattcctaattactgtgttctactttttaatagagagctcttgaaggtccaaggaaaggaatgcataatggtgtggtcaaggcattagtgttaatatttgtagaaagggtaattaacaacagtctgagcaatcacattctaacaactagtaaggttggcaggagcctcagtataatggtgtgaggaacgaaatcattatagtgccaaatagagtataccatctctttagtacaatgtctttcaaaatgaggctgattgtgttggctttatatttgactccttaataattaaggcagtaaattctagctggagctaaatacctacaaggcctaaaacagcataatggacaacctggcaggtgtccttgctggaagatgacaagagtgctgaaaggagagtcctggtttttctcccaagacatgacatttgggggcttccattaaaaaattaccaagcctctgccactgtaatctcttccttaagtgcctatgattttttcacagtcacaggtctatgcctggtcaatacccagtggccaggtctctgagctgcgtgcagagatggcagcgacttggagggctgggaggagataaggggaggaaagatcacttttcatgacaacttacaacttgattccacttataagccatttattttcagaaacaagtaatgggtgaggacacaggccaggtccacaatttgtgcacttgagagattaaggcctccgagatcaaattaccacagcaaactgagacagaattattgtagggatgtttggggaggatgcagagagaagaggaagaagccagagacccaagaaaggagacaggaatagattttgatgaaaattgcttcctactctgtacccttgaggaaacaaagaggacaaataagaagcagcagtgataggaggctgggcgcttctctggaataacactggctaggtagtggagcattgatagtgagtgtgcttggttggtggaacgaagggatgtgctagttcaggcctttgaattctgggtgtcaggatcacaaccttggctcctttaactgtccgctctaggagggaagcatgccaaatgtcaggtctcactctgactttgttccagtccatagctagaaaatgacccatagaggaagatctacagatgacagaatactgggagatgaagagaaaggacgttttagtgagtgctttttttgcacatgaggcaatagatttcaaattcctgtggaagaaatgtgagaacctgggaagagtgaatattcagaactgagcagcagaggcaatgacacagcatggaaagatttcctctgatccttctaccttctcttttactgaagtgaatttgttgtctctgtgttgcctctatagcagtacaagaggaaacttggggacacagaagaacagaagtctaaggagtcttatatttaaggaagataagctgcagtcattgaaattgctggttattgtaagataaatcccagactcccacattttgcttaatgacagcagatttttttttttttttaactgcaaagcattaatggaatccaaattccagcctggcttaggagatcaacagtaacgctcttgatttaatggttttgcagactcttgaagacattgtcatccattaaagaaaaaattttaaattactcttgaaagaaaatgtcttgggtgataaatgtaaaagatttgaagcaagattagaaaaagcttgagagaagaatctctttaaaaattttaccagattttccccattgtcgccaaaatgggtcaaataatagatttgcctacagcttcatggagactatttttttaaacagagcattttaaacatttaaatattggttatttgccaaggcacacactgaaaataagggccacttggccgagagcagaattgagtcttggatcccaggatgctggttttaggcttgctcccggaaagagggcagcatttgccatccccctccttttgccctaggagttgagcactttctgcagtacttaagagtgtccagggaagatgtgggagtcaggtgaatagttcccatcgccagtaaccccagagcgcctccccctgcgttgtttccttttaatgttagatccgccgcctgggtgcccatacttagctaaggcccctcagtttattttcctgaattgcgcttggagatcttttcctggggagctgatagccagacttctaggggcttgactgcttttcccagactaatctccttaaagacccgttaagcaggggagagacggtggagactggatgaactggacagtgggggtagggagaaagggagtggccgtgttcctgcggtccgctgggatccggcaggtccagggtgaaggagatggggctggagaggctgagcagtccgggttcgctgtccgccacttcggcgcggaatcagagcaggacttgctgagccctcctaccgctccctttccccctccccctctgtcttcccttctgtttccttttccctccccctggagctgtagcggcagcagcagcaggaagccgagccgggttgagcgactcggaggcgagcggaggagctggaatatggggagtcagcgaggacggtggggccaggagcccttgggagggcctacggagggagcggccccaggcgctttctagagcgtgagcggtgggggagcaggcgcagggtggcacgagcggaggcggggcccgggcgtggggcacggctggggaagctgccgcctccggccctgcccggctgcctccgccgcggccagtggctatggagcaggcgggcaccagacctgcggcgacagagcatccacggctccggcggcccatgccctggctgctgctactgcctctcctgctgctgttgctgctgctgctacctggccctgcggcctcccagctgcgatactctgtgccagaggagcaggcacccggcgcgctcgtgggcaacgtggctcgcgcgctggggcttgagctgcggcgcttggggccgggttgcttgcgcatcaaccatctgggtgcgcccagtccgcgctacctggagctggacctgacgagtggagcgctcttcgtcaacgagcgcattgatcgggaggcgctgtgtgagcagcggcctcgctgcctgctcagcttggaagtgctggcgcacaaccccgtggcggtgagcgccgttgaggtggaaatattggacatcaacgacaactcaccgcgtttcccgcggcccaactaccagcttcaggtaagcgaatcggtggcgcctggagcgcgctttcacatagagagtgcgcaggaccccgacgtgggcgccaactcagtacagacctacgagctcagccccagcgagcacttcgagctggaccttaagcccctgcaggagaacagtaaagtgcttgagctggtgctgcgtaagggcctagaccgggagcaggcagccttgcaccacctggttctcacagccgtggatgggggcatcccagcccgctcgggtacggcacagatctctgtgcgtgtcctggacactaacgacaactctcctgcctttgaccagtccacttatcgcgtccagctacgggaggactcacccccaggcacattggtggtgaagctgaatgcctcagacccggatgagggctccaatggtgagctcaggtactccttgagcagctacacgtcggaccgggagaggcagctcttcagcatagatgccagtaccggggaagtgcgagtaattggggggctggattatgaggaagcctcctcctaccagatctatgtgcaggcgactgaccggggtccagtgcccatggcaggtcactgcaaggtgctggtggacatcgtggacgtgaatgacaatgccccagaggtggtgctcacggacctgtatagcccagtgcctgagaatgctacacccaacaccattgtggccgttctcagtgtcaatgaccaagactcaggccccaaccggaaagtgagcctgggtctggaggccacactgcctttccgactgaatggctttggaaactcctatacactggtggtgagcggcccactggaccgagagcgggtggctgtctacaacatcacggtgacagccacagatgggggaataccgcagctcacatccctgcgtacactgaaggttgagatctctgacatcaatgacaatccaccaagcttcctggaggactcctattccatctacatacaggagaacaatttgccaggtgtgttgctctgtactgtgcaagccacagacccagatgaaaaggagaatgcagaggtgacctactcccttctggagagggagattcaagggctgccagtcacctcctatgtctccattaacagtgccagtggcagcctttatgctgtcaactcctttgactatgagaagtttcgggagttctttgtgactgtggaggctcaggacaaggggagcccaccactgagcagcactgtgactgccaacgtatatgtggtggacatgaatgaccatgcccctcacattctgtaccctacctcaaccaactcgtcagcagccttcgagatggtgcctcgaactgcccctgctggctacctggtcaccaaagtcatagctatggactcagactctgggcaaaatgcttggcttttttaccatctagcccagacttctgacctggacctctttaaggtagagctgcacacaggagaaattaggactaccaggaagatgggagatgagagtggtagcactttcaacctgaccgtggtggtccgagataatggagagccatcactatcagcctctgtggccattacagtagctgtggtggatagggtttccaaaatcctccctgacactcagaggcatgttaagagccctcggacatactctgaaattaccctttatctaataatagcattaagcacagtgtcttttatatttcttttgacaatcatcattttgagcatcatcaagtgctaccgctacactgcgtatggcactgcatgctgtggaggcttctgtggagtaagggaaaggtcccctgcagaactgtacaaacaagccaacaacaatattgatgccaggataccgcatggcctcaaagtgcagcctcacttcattgaagttcgagggaatggctccctcaccaagacctactgctacaaggcctgtctgacagcaggctcagggagtgacactttcatgttttacaatacaggggcccagacaggaccagggccttcgggagcccaagcagcagtgactgacagcaggaatctcacaggccaaagtggtcagaatgctgggaacctgattattctcaaaaatgaggctgtttctcaaaatgaggtgagacagtggtcagggggtcttctacaaactcatgcatttgttacacatcccccaatatcctgtgatttggctttattgagtcattaacagtgacaagagttatctggtaaactgagtatatatagtatccacaatttgatcataatctgctatttcctctctagaaaaatagcactaaagaattgttttatttttcattttcagaggcatgaagccttgtccataaaattgtttgagaagtgaggattagtcttaatatttaatgctaaaacacagatttgtagagaaacaggacaggccttggaatagggattatgttttagggagtaatgttatgagactcaaggagaaatggcctctgctgtatcatctacagggaaatttttcttttgaaatcctatatgagtgatgtttcttaaaaagctctgaggcctctaggggctatcatagtcaccactatctgctgtctctgtttatactctggactgtctacagtggaaattatctagttaatatttctggtacttgcactgaacctatgtgataggatcctctggaaatgcatgtcacaagtgataaagctgtagtatttagacatcatactgaagctaaagtttgctttggctgtatgatgtggcaactcttctgtagagggctgtcagagggagtggatgatggtgaggcagagagattaagtaccaatttgtctggttggtccagggaggtattagaatgagtggattaggggtgtggggggatggtgaagaccaagagaagctgggattagaaggaagagaagggaaaaagaattctcccaatagtcacctttcttggcatactctgaattcattgtaagaggatttccctgaatttagcttaaatgcagcctgtaatcttctgattttctgttgacagtttctatggttttgatgagatgtaaagtagccttttcaagtccttcatgtctttaagttaaatgacagtacttccaaagcatgcattcattttctggatctaaaatttgatttgctatagcttcaaaaggctggcttggaaagtggatggcttaccctacagtaaggtgtagaggcaggtgttagtatatgcactagttttgagatttaagtaggtataaggccagcttgttcattattatgaagaatgtacataaattattagaaagtagatgaatatgtgtgtgtgtttgtgttgtgtgttcgtctccatatgtatgcttgaaataacagagatatgctttgtgatacttaaaacttggatttcaaaagccaaaattttgtaccataaatagtgatgaattgttatctttccaaataactactttgtagaaagggcttttagagctactacacaatgtgtgaacaatatttgtctctcctctattttttgcaatatattttcattgacatattgctgtacatacatattgtatgtaatatccatattgttacatttcaagttcatggtaatcttgaggaatgtaatgcacaggcacaaaagttccattcctgattgagagtagatttttctcatggacatttcagatagatttattcatttatcagaagtgcctggtgttagtcaatgctgagaaaccatgggaggcagattgtagattaagaaaaatgggggaataaatcaaagagtttccagaagtctttagatcgtagcatttgaaagcacgtaaaagggtttagctttaaataaggttgctgtagacatttgcttaacaaattcttgtgaagccctttgggattggggtgggctacaggtggtgaagaggcatgaacaagtcaggccaggctcagctttgccaccagctgtaagccggaagctcagaggaaagacactgttaccctccctctcctgactcaaagcttggggcaatttgatacataaactatttctgtcttacactgacctgtatattaatatgtactttggtacacaaacatttaatctagggagaaaattatttcagaaagtgcttgcttttgggagattttgccaggagagtgcatgactttaataaaggcaaatttctgccaggcacttttggaaatccagtgaagaaccccaagatctacagctccagaaatttttgcagttatagggagagagtgtcacattgttacagtgtggcaagataggagcaaaagccactcagttctgaaagtcatcattgccagatcaacctgttaaattcccatgttgggctttctttttttcctacctagttactacagatggcaggagagtcctggggtacaattagtaccatgtgcctacattaaaagtagatgggaattagagaggaagagtaagggaatttgtactcactaaccaccctgctatatagatatatgtatatcatacatatacacatacatatatctcatattactgaatcttgaatattattcaagattattcaatatattgaatattataatattgaatacatatatgatttcattacctgcaagtcatgcgttaaatatttgttaacatctagcatatgaggaaataagctcagggaggttaggtaatctacacagccacactgctagtgttattttaagttgtatccatctgactccaaaaactttttttcaatactatgagtagacagaagttccaatgtttatattcccttttatatgggatattcaggcatttaagctatcactaattcacctagtcgtatatattaactgcttttggaaaaagagtaatttctggcatagaagcaggtaacaaatgggaatatcagtgagttactactatttttttatttttatttttttgagacagagtcttggcctgtcacccaggctggagtataggtgtgaatatggctcactgcagcctcgaccttctgggctcaagcaatcctcacacatcagcctcctgagtagcttggaccatagatgtgcgccaccgtgtctgactagtttttaggtgttttttttttttggaagagatgggggtctcactatgttgcacatgctgttagtatatttgtatttgtttatttgcttcactattggcaaaccctgttaagatcttttatttttattatttcactgatttttctcttgttgcttattaaacatcagcatttaaccccagactctaatctgttggtagattttacccccagtgagcttatttcataaatcacttgtgcagtgaggattctgaagtaactatttggcaatagggcagaatttctctttggaaatttctgaacttgatactgaatgttgttggcactcccttcagagtctccataaaaagaaaccaaattttttttttttttttttttttgagatggagtctcactctgttgccaggctggagtgcagtggcgtaatcccggctcactgcaacctccgcctcccaagttaaagtgattcttctgcctcagcctcctgagtagctgagattacaggcacgcgccaccacgcctggctaatttttgtatttttagtagagatggggtttcatcatgttgtccaggatggtctcgatctcttgaccttgtgatccacccgccttggcctcccaaagtgctgggattacagatgtgagccaccatgcccggcaaaggaaaccaaatcttaaggtagattctgtgcatttgtggtcgtggtgttgtgattgttaatgagtcactttgagtactctagtagatttgtccaacagtgtctcagtgggcccagctggcacaacatgtagaaattatgaaagagtagcagagatgaattaagtttgcattcactttcacttattttaaagcaatttgtagtcaccaaaccttcagttatttctgccactatgtgtgcatattcaccctaattccaggtatagtgacctgaaagagttaattcttctttcagtggcacctacttttatttcccccagcactgatttttctatctgatgactctatcctggaacagagtttacactcgttgtaaagtgacatagtagtgaatttataaaaattgcacaatggtcagaatagacaaagaaatcatatctatgagcttccactccagtttttcatcctctgatggtcactttataatgactggggctgttttagtttgcaaatttcatattggtcacaggactcttcttctgagaaaaagtttattttctttggtctgatgatacaataatttatttcaattacctctttcctcaatttttctacagactgctgagccagatggaattatggctgagctcttctctgtttctgtatcttgtacacattctgactgaagaagaaatctatttattgtagcttgaatgtcattggcctactgtttccttctgacccaggagtgagccatcacatgggcatctggtctaactcagaacactctgcagggacacagcctggcatattataggttgcctattggcatgctgtctacttgacagaatagcaaagtcagttctgggtacttgcttgttgcctaccaatttttgctctcaatgagaggtcagaataatgtcaatttgcaaatgtttgaggaaacattcctgtcaccaaacccagaggtttagctgaatatgatggcattttacaggtgtctttaaatgtggcttttacagaacttcacctggatcaatgttttgtgcatgtgataatacaactataaatttagcttattaatatgataatatttggagcagtataatctataaccatgacttcaaaaatcaaaggttaaaagtattcttttgcagtgttttaaatctgctaacctgaaaactatacaagggtttttctttcaagaattttaacttgacaaatgcaaaggaatatccaacattgcaaaggtaaagagaaatcttagttccttggcatataagcaccatcagttcctttctggccttccagggtcagaactctgggctccaaggaggtacaactgtgagtgagagagtagctgctgtgctagcaggctatgcatccagaactaaacagacctagcactttctgttgtactggaacccattaggtatgttctaaagttatgtttattttactttcctggtttgtaaattagcattttaaatgactacattcagaggaaagtattccacccagaattctcaaatgtattacctttgtgttttattttattttagtttttttgagacggagttttgctcttgttgcccaggctggagtgcaatggcatgatcttggctcactgcaacctctgcctccagggttcaagcgattctcctgcctcaacctcccgagtagctgagattacaggcatgcgccaccatgcctggctaattttgtatttttgggtttcaccatgttgttcaagctgctctcgaactcctgtctccaccttggcctcccaaagtgctgggattacaggtatgagccactgcgcccagccctcattttgatatactagaagaccaatatgcaacataatgattattttaaatgttatattcccttttgccttaatgcggaacagtctatgtatcccttttctgatgatttgtaacaaattaccacaagtaagttgtttaaaacaccacctatttgttatctcacagtcctgtaccatgtggctgagttgtccgctcaggtattctcaaggctgaaatgaacacagctgggctgtgttgtcctttgcaggctcttaggaagaatctactatcgagctcattcagattgttggcagaatccagttgtttggggactgagatctctgttttcctacttactattggcctggggtcactctcagttcctagagaactgaggactcaggactcttgtcccatggtctgctccatcttcatggctggcactggagaatcttccctcacatggaatccctcttatgcttcagatctctctgatttctgtctctgacctctagacccagatttaaagagctcatgtgattatgtcagtcccatccagatgatctccctttcttaaagccaactgtgctacatagcataatgtaatcatgggaataagatccatcacaatcacagtcttggagactattcagggtgtgcacaccaggatatagggatcttggggccatcttggaattctgcctatcagtttatatcaatgttcataaaatagcactatgcaaaatctgcagtggatatattcttaatacagtcctattaggaaggaaaaggagatattatatgcagtctcatgtcccagagggcaatttgttgatgtcttccacatggatttccatggtacgaagatagcatattatttcattgagtagttgtgtgagtttattaataaaatagggtattttaaacttattttactttaaatcttagaagaggtgattcatccttctgtagctcaaatattctatgtcataaatcacagataataccattacaagataaattaaatcttttttataattttaataggaactgaagtgtattcttattcttcagtaatactacatcacccatatggactacctaattgattttttccacatatggagttttgtgaccattattctaccaaaagactaacctttgaagcaataggacatattagagttcttcaccaatagaaagtaagcatagtcctgggaggtaccatctaagtattaaagaactaaataatcacagttatttcaactgtgattgaaattgtgatagtaatatatgtcttactgtgtcagatatatcagtagtcaacttttcaacttgaatttttccaagtttaatcaagttctggatgaaactcatgtacattttactacttttagttttgtattgttttaaatcaatatcctggaaactcagaagtaaaaaagagaaagaagaaaaatatatgtcatttcatgtaaatttatttaaaacacagacttttggcaaggcacagtggctcaagcctgtaatcccagcactttgggaggccgaggagggtggattgcctgaggtcaggtgttcaagaccagcctggccaacatggtgaaaccccatctctactaaaaattcaaaaattagccaggtacggtggcagatgcctgtaatcccagctactagggaggctggggaagaagaattgcttgaatccgggaggcagaggttgcagggagccaagatcgcgccactgcacaccagcctaaatgacagagtaagaccctatctcataaataaataaataaatataaataaaacacagacttttgtgttaaggggacctaaacatgactgtcagctgaactcagcaatcagacaagtaatttaatctctccaaagttcagatgtctcatttttgcaatttaagtacaataatgttgactttgcattatagttcatttatttaaacacattttaaaaacctcccagatgccagaagcctgctagactctgactatatagctacgcttttatgaatatctgaagatatgcatgtgtctaatgagcaaaacagatataatccctttcatagagtttactgtctgacaaagaaagaattaggatacatgcaacagtatgtaataaagtgcaaaatctagtactgtgtagctacttaaaacatattatatgctttcttcctttccttttccctgcctgatcttactgccataagaaatcttgtaactgtgattctgtcaaatgaatctaagaaggatgttgttgctgatggactagtatagaaaatagcagcatgacaaattaaatgtgtcattggggaagtgagattgtataatgaactgagtttcctggtcagtcctgctggaactgtgcctttcagcaaaatgagtttgatgatttcattccaaagatcaagttgcagcaattttcatcatgaatgttacccaatcatagaaaaattggcaacatttctcagcagatgttacagtctttctcaaaggaaggttctctcagctgacaagctaacgatagtgctcctgatggcgaggggagagacggtgatgatgactgattgataaaaagtattttagtcatatttccaggtttataaaatgatttgcaaacattttcttttgttccctctaacaccgctagtagataatggaaactcctttgatttggtctgtagataattttatgctatgttatatggaatatccacagcattttgtgaacttgaaaacaaaggaggaagcagcttgcatatgcatatcttgctagcagattggtagaatagagagagcagttagcatgtgaggaccattgaggtaaagtatcccagagttgtaactttttctgggccttgactttggctaattctctgcatgccaaatatcatgtagccatccagaaatctgtctgaatattgagatggtgatcatttctctcctgggtgttatgaagaaatgtgtttattaaatactttgcatcccttaaaggaactatatgaatgataggaataagaattattgacagttttgaatggtctattgatattactatggctttgtttctaccaaatatggtaagtataatgtagaggaaaatacaaaatacaacttttatcccccatttttttcattcaactatacctcaatattcagtgacagggccacctcaatctccgcccatgaaaacgcatctagaggagtgtcacaagtttttcacagtgacatttttgcttactgatacaagacagtgatggtgactgatgatgtcccagtgatttctgagtagcttctaaccagcacataactcccccaacagtctttaagtctttaggtgcccatattttcctctttgttctcccccttcagactgagagtttgtagagagagggcaacagatcttttcaatacacaactaatgcaaaatgtatcaggtttttcttggatttcagctactccctgttaaacaatcagagcttagtgaacagtgattcagtgaggagggaaagcactcaggaaggagcaggaacaagtacaagtttatgaaaaggattagctagcaaaacaaggtcaaactctgcaatagtttgttttcctctccctagtatccctcttcaatcagaaaagagactgttatcagttgctggtgttatgactgggcacatccgccctgggtcaaatatgctgcagtctgcaaagccagcagcagattgcagtcctctgcagtccagccaggccagcagaacttgtgtagccatgtgccctgttatagctgtaatactgaattgggaatgttcccttaatggggcacttgagggcaaaagcagtgaaagcttttcctttctcaaagcagactgttcttcccgtagtgttttaagaacacagacatgtattgggcaaggcaaagccaaaggtggcctttacaagattattaaatctggtcttccagggtatctaatctgtgtgaggaccctgatgaactaattttcttctaaagtgctatatatgtagatatcatcatagagttacacatgaaatggctcattcaatacttttttagatgcctggaaatatttaagggagtaactaatcaattagcagcattcctgggagaacattgtcttgtcattttaacagaaaactctctttgtgattttgcagccacgacagcccaaccctgactggcgttactctgcctccctgagagcaggcatgcacaggtatgtatttccctcctcattcactcagaagtaaccttaacttggtatggctcagataaactgcatctccataggccagaagcagctgtcaaaactaaaaagctttaggtactttgccaggaaaatgcaattattttgtccccatgtttattccttgaaagatcgcaaatggtcagtgccagatgcttatcaagtgctggcatataagagtcctctgtaaaatcacagaaacaggctgctatgtattttctcccatcaaaatttctacagggaagtaatttcaacctccttcatccctctctacctatgctttcttttcctcctttaaaaactgtaattaatactcatgctttgagacttgggtacattgtgcaatgtatacatacatgttgtctaccttgttttttttttaatctcacattggctattacatcctattaccctcaataattgattgctattgttgtttgtgttcacacctattagagcctcctcatctttcccatctgttgctatcttattgtcatcaatgacatggttcttcagaagatgagccatgtaaagggctccaaatctagcttactttaaattaacctagagtaacggtattagtctaagactcagattaaatataattttgctttctctactttgtctctctgacagtaattgattaactaccattatttctggaggtgatccagtatccatgccatggggccaaataaaagattcattatttgcgaatgtctttggaaaccaaatgggaaggaccaagaaacaaatgatcacaactatcaaaaggatttaattttaaagaagaaataatcttcaaacttaagcccctcaaaatatctgggcaactatcaagtgaatattcaccaaacttagatcagttcgtaaagagaaagcctacaaagtatgtgtagagttaatgtgaaattagttttagcccattaaaatgcattagattgaaataaattaacatactctcaagcattacaaatgagcagaaatcattacattgggtgctatttctgattcagaagcaatcagtgaagggctgaagattagtagttggcttggtaagatgtcacattggaacctgggtcataattttaggccagaaacattcatgcatataccagaatattaggtatcagaagaaattctttatatttattagagaccaacttgtgcttttgcctgcatctgagctgttggtggagacatgcaatgggtaaaagcatggtttacagtaccaactcttgaaaagtaccaaagctatgagttgtgccttaaaaactacatttgaaataaaacattaaaacataacttcctggactgggcgcggtggctcacacctgtaatcccagcactttgggaggccgaggtgggcagatcatgaggtcaagagatcgagaccatcctggacaacacggtgaaaccctgtctctactaaaaatacaaaaattagctgggcgtgatggcatgtgcctgtagttccagctactagggaggctgaggcaggagaatcgcttgaacccgggaggcggaagttgcagtgagccaagatcgagccactgcactccagcctggcgacagtgcgagactctgtctcagaagaataaataaatgaataaaataacataacttccttatcccattttcaaattgaaaaaaaaaagccaaatgtgctcctattcgggtttcaattaagatattatgagatttgagtagggtaagaaataaaataaaaattgaaattaaaatgccatttcttttttgcattgtaatacattgaacatattaaatgagttgtgaacctaaataatactaatctttttcgtatgtgtgcttgggtgttctcggtctttccagtcttggacatcatgtaactattctttaaaaaattctgctttgagctgagctggctccaggatagttacaccttcatgaatctgactgagcccacacaatttgctagtaggatccaggaacacttgaaggctgttaatatttggggaaaaaaaacagataattctagagtgtagacaaggggaagaatagtaaaaggtcagagtttaatgagtgaatttctactggatatgttgtttgaagtcaaagagtgagaaaacattgaacttatatgttgccttccctctaatagttcaagtttgcctgctctgttgcctcatataacccctttagtcagtagtctaaattttattttagaaatttaactttcaagataagcaaatgtctagtttaaaagggtcctctagtctaggtgtagtggctcatgcctgtaatcccagcactttgggagggtgaggcaggtggatcacttgaggtcaggagttcaagaccagcctggtcaatatggtgaaaacctgtctctactaaaaatacaaaaatgagccaggcatggtggcgggtgcctgtagtcccagctacttgggaggctgaggcaggagaattgcttgaacctgggaggcagaggttgcagtgagctgagatcgtgccactgtactccagcctgagtgacagagtgaggctttgtctcaaaaataaataaaataaaacaaaatgttcctctaattttgatgagggttttcttggacattttctcttaggatcccacttatttcttccttcctttcttccttcctcccttccatcattcattcattcattcattcattcatccaacaaatatttgagagattaatatgagttagtattagacatacataaatgaatactgcaccatgttctcttttcccttgaacagtttatgttctatctctgcttgcctctaaaggtctcccagtttgtatctcactcccagcaatgttttatgctgaattaatctcttctgagcggggatctgtgagtggtggtgatcaagtttctctagtctcaggaaatatagggtgggtcatctatgcataaaagatatagaaagagtaaaatagaaaataaggttaagaattaattagatagccaaattggaacaatactccaattatcagaaaatattttagtgtgttttcttctttagagtagagaacctaggaacaagagaacctgcaagagaggcttggaacttttgagaacaagccctcctcatctgcttcagtatcgagatgttaaaatggcttagtcctctgatgggcttcctgttagatttagtgagcgccacatggcgttaataaaaaacagaattgccataaagatagaacatgtgtgttcctggaatagtatagcaggcaataagtaagtcagcaatgcttctgcagtttatgcagggtgactgctcagcagtaattgcttcagttcaagcatgagcagaatgtgttagctgcagccctggcttcatagttgtaagcaatttctgagggtggaagaagagatgggaaagaatttatgatctaaccgttatctgggtctgtgtgtttattcagctctgtgcacctagaggaggctggcattctacgggctggtccaggagggcctgatcagcagtggccaacagtatccagtgcaacaccaggtaaagagctggggtctctccattctttcttggtttctggaaagtgatcagatgacctacttttgtaagatcaggaatgttgatggctctttttcttttatatttttgttattcccttttttccatacatacatgatttccttacatatatgattattttgattttatacctaatgctcttcaggagttgaaaaaggataacaaggaaagtgtgtgtgcacgcatgtgtgcatgtgtgtgtgtgtgtatgaagtttttggggtttgtttgtttgtttaaatcaggtacctttcaaatgcttaggtcatccaagccatgcagagaagatctggtggccttatgcacagagatgacactgttaacaaagatcttttggttgaagactatggaaacccacccaaagtagtaaggaaagaaagagaaaaagaaggaaagaaagaaaaaggaaggaaggaaggaagatggtttctcatggaagtggaaaattatcggaaccaaggcattgttttgagttcaagtcaaagtcaatctgcttctctctgcacatcaacaacattctgcagactgacttttagtgccttggcatgcatgttgccaaacatgaccgcctcacaatttcttagtttagagggataatagggactatttcctaatccaaactttcaggaaagagaacctgctaagttgtgtaaaaaacctaatggctgggtgagtataggaaaattgcttaaactcacatttgcttggtatccttattcttgccctatcactaaagcagggtcatgtaatagaaatatggctttggaggcccatcgctgtggcagttttcagaaagggaagattaagtgttggtagagaccacaaattgtgtctactctaatcctctattaatagaacatcatgatgataatagtagttactaattattaagccataatatgcctagacactgtgccaagtacattgtatgtgtggtctcatttattccttaagtcaagcttgcaagggatttattacatctattctacatatgagaaactggagaggcagagagattaagaaatgtacccaagttcacgtagcttgtaagtggcagagggtaggattcaaacccagatgtgtttagtttcaaatccaagtatatctagcacttatattcataacatggctggcttgcaataatccattcaaattcaaatacatatctacatacataacagatgacagaatgtgtgtgtaaaaggttttttcccaaaaataatcagatgcctttcaaattattaagtaacatgcagctaagggcccatttttactggcaactttaagggcattcgttgattctaatcagccaggatttgctatttatggatgttgcacaattcaactaaaagtcacatttgtccaaaaaatatacgagttgaagcaattcattagagagctaatattgccagattgcaaggggaaaaacataaaatagttcattgacaaatctgtaccctcagtgccaacgatggagtgaagaaatgatggaggaggaagtggttttagactgccaagtgttgcaggatgtggaggcatctgggaaggtgagaacttcccaaagaagccacgtgaaatcatgactttctaccttgcctttatttcagagtttttcttgctcttatggaggcattgtaggtcgacctggtaagccacaaactaactttgaatacattctccctcccattggtgatgctggttggtgtgtattcctaggcaaatgtggaataggaaccatgtattgatatttcatacatctggccaagtccctctttcagattcaaaaaatgttgagaacctatcttttttacagagatagagaaggggatctcccttgttccctttcttactgtcccagcccctcttgtataacccattttatccagaactgtgcctggctgctgatgcatgagtcacagtcttcatggactgtgctggatagagcttacatcttccaactactccatggcaacctaatcatacttttcaatacatacctctgcatcagtggtgtaaagttaaagggattctctgccttctccctgtccttctggtacttttaggtttttaggactcaatatatgttctgcactgcttggagggaatatggcataaagattaagattatgatttagagtcagatttgagttgaattctaatcccaagcttacttgctgggtgagcatagacaaactgcctgaattcatattttcttaattaccctttctgtaaattgggtgtagtaataataataacacctattttattgagttaccatgagaactaaaggagaaaaaaagaactgagcatagtgcttgacatatagttaataaatgtctaatcttttttttttgagacagagtctcgctctgtcccccaggctggagtccagtggcacgatatcggctcacagcaacctctgcctcctgggttcaagtgattctcctgcctcagcctcctgagtagctgagactacaggcgtgtgccaccaagcctggctaattttttgtgtttttagtaaagacggggtttcaccgtgttagccaggattgtctcaatctcctgacctcgtaatccgcctgcctcggtctcccaaagtgttgggattacaggcgtgagccaccgcgcctggcctaatcttcttactcttttttctttctggactacttttctgcaatctatgatatagtgttggctgatagcctggtggccagaattcagtagttctcatttgcaggcccagatatagaccctctgaggttatctgggtctatataatccagtcaccccaactgttcccctggaaatggagtgaggaggatttattagttgctgcctgaagaaaagggaaatgctccaaaaaatttggttgtttccagactcaaatagagcctgcctttcattgattctgttgcccttaaagcttcacggtgaagatgcagttgcttccaaaaggcttctttctggtgcctaagcctccttatacttgcttcagagccctttccgtgaaccagctgtgtattgctcttctcatcccaacacttgcaatggctgaataaaggaagtggggcctgccttacgctaatcctcgttcatatgtgtttcttaaagttatttttccttcactgatgaattccttttttttttttttttttttgagacagtctcgctctgtcgcccaggctggagtgcagtggcacgatctcagctcacaacaagctctgcctcccgggttcatgccactctcctgcctcagcctcctgagtagctgggactacaggcgcccgccaccactcccgtctaattttttgtatttttagtagagccggggtttcactgtgttagccaggatggtctcaatctcctgacctcgtgatccgcccacctcagcctcccaaagtgctgggattacaggcgtgagccactgcgcctggcctcactgatgaattcttttgctttttaaagaaactgttcatttattttcacagtctgcaaaagcctaagataaagatgccacactctgaaaggatcaacaagggcatcaccaagtaatgttttctgcaggataaacaagtcaggcattaaattggttaatcctgattactggcccctttctctagcctcccctctgtgtgagcagacccggaccacaggctttcttatttcctttcagcttcccttgagactgagcagagagagaaaattagctaaatcaggaatgcagggaatacagttgcagcctcttcttcagatggaggaatgcgttttggggggagggacattaaagggccagtcgctcatgttacagctctttttaacttcatgagtactaatgccctgaagaggttttaatgaatgccctcttgtgatcagttcctagggcaatcccaggttataaaaggactgcccctgcctgtgagggaactggcctggcttcagtgggccaggctgctttgttatctgttattggtttttccagctcctctttctacatttcaagggatctcaggccttacctaaggcaacagtacattagttttagagtgggagatgctcacagttttcagaagagttcagaaagtttcaaaacacacagcactgcagaagataacattatagcttctcaagaccccaggggatctgggactaaacagtgaaagattaattaggtagcggaagccactaaggcagtgagtcttagttagagaactttggtttagacaatggttctcaaaggggcagcaacaccaacaatacccggaaacttgttagaaatgcaaattcttaggccctatcctagactaatgaatcagaaattctcaggatggaggctgggtgtggtcgctcatgcctgtaattccagcactttgggaggccaaggcaggcagatcacttgaggtcatgagttcgagaccagcctggtcaacatggcgaaaccccatctctactaaagttacaaaaatgagctgggcgtggtggcaggtgcctgtaatcccagctactcgggaggctgaggcaggagaattgcttgaactcgggaggtggaggttgcagtgagctgagattgcaccactgcactccagcctgggtgacagagtgagactccatctcaaaaaaaaaaaaaataataaataaagaaagaaagacattctcaggaatgggacccggcagtctatgttttaacaagccttctatgtgataccaatgtactgtgaagttttaagaactggtctaaggtaaatattcctgaggttgtcttatatcattacagggtcagaatgcatgcaaggaagccatctgtttatggttcttgtgagaagcagggggcctttccccatgcccgagagataattgttaagagctcaagcttgggagtcagtgaccctttctgaattctacctctgccactcagtaattgtatgttcctgggaccattacttaactttcctgattctcagtttctttctctataaaatggggagaatagtggtgtctaccttatagggttcttggaagaattagatgagataatgcacacatattgcagaatctgaagaacaatcagggtttagtaaatagtagctatttttaaatgatttttccaggtatgagtctatcctacagcttcaaaatttagacccaggttgttctgagtattctctgtgggaagaatctgctatagagaagatttttttaaagtgcctgtctctttgtttccttaggggattgcttttgccctgatttgccacatctctttactctgtggaaaatggacagtttatgtgccctagttttatatggggatttatattcttaattgtctcaaggattcttacctgtctgacaaaaccaactccccatggaaagactccatggagactccatctctgatccttccccagaaagaaagcatgattcttaagttttttagaatctgtttaggagcactgtcaacatgaatttttctatttcatgagtgagtgcagcctcgggccttgttggagaatttagaaagcatgctgttccactaacctgttcaacctcaacttctgccgttgtcatagcaatgacagtcctgggaggtgtgtgcatatccttattaggaaaaaaaaatgagatcagggatctatgtgagtggggcagctcccgcctgtgagtatccttcgctgtcacctgccatctgacagcccaggagtgccagcttggcttggctttctctacccgaggaaagtaagtccttttaagatgcacttttactttctggggttgtgaaactcattgtgtttgccagagttctcttcgcagcttatgtaaagaatttgtttgttttggattgacctgaagggaggaagcaagggtgtgggaaggggaattagcatcccctacctaggagaagccatgaagcttacttaagtctctgctggctccatccattcatgactttcttcatcttcttcttgggaaaacactctgtaccttccacttttaatggtcatgtaaataaaagactagaatggagatgtcctggttttctgaaattaaacatttttgtttatgaatagactctaagataattctttccctagacgctctgtattttcttggacctctcatttgccccatagtaattattctaggattggtggcctgggcagaatacagtcatggttaagaccatgatacataatagaagaatttcttccgtaacagtagccccaaacagagatcacgtgtctcctgaaacctatccagtctcatgtgcactcagatgtacgatcctggatataacattttagagggtgtagtgaggagaatagaacaacactgttctcttaggctgcagtttccttcaagccccacgatggagagaagcaggctaatgcagggtaaggaaatagagacttattatagtttcttcagttatcattgattcctttaatatgccagctacattgaggcaatacagtctggcctctgaaaaccttgtcaggagaaacaacttttgaatatatcttagaaaaataagacactttatcccttcttttgtttaagagtgttgcataaaacaggagagtttctgaattaccctcccttctagctttctttatacaccattctttgtagctgaagttttaagccccttgtcaaaagggagattcaagtttctgctggggacatctcagtgtcacaaagggccaaggaagtagggtctcaccaactttgccacctgactcagctcaaaggtgataggtcacctgtgtgactgagagctttgtgggaaagatgatatggagggtggagagtctgcacttcactctgtgggaaaaattgctgaggttgtttagaattgttaggcttggaactcctcctgggaggtgcttgaacaagaaagacctgcttataacctgagttgagggcagaggaggaagatagtttgtaattcctttacgttttgtggctccggcaagccctgtcctcagcctcactgacacaagtaaactaaaaatgaaagtctgtcctagtgacagcaagggtctttcatggcaatattttaaaagaaactctgcccagatttcaaaggaacgtgaaaattttatcttcagaggcagtcagctttgcagttgaaaaggccattgcctaatctggagaaacatattcagttcaagcactggctagagactagaggcccccaggaaagggccataagattggtcactgccaggaagcctgtcaatgagtgtgtggactggagaggaatctttctctgcctcagcacttggagtctccgttattcacaatcagaaaaagagggagagcagagatagatgacattccacgtttttctcggtgagaccaagagcttcctcagcaacagccctgcctgaaattgtctatctccaagggcgtgggctaggcaaaggatgggagaagtcagtcctgaagatggtaatacttaaaggaaataagggggacaaaggatgcttgtgctactattgaaacaggaaattgagagctctgtagaagtcagactcaagaggcataataatagaaagttagggtatgaaaaggtgacttttaagaaccaaatgtggacccgaaagagaacaaagagaagtttattgtaactagcgttgtattccttgtctgctggataccaaacaatgtaccccgggtcttgagattatcgatgccattgtctgtaaaaaaccaaccaaacaaactttaaaaataagtaaagcctgccctgtacagaaaatctaataaagcaaatttgttggtgatgttccaagaaggttcaccagcttgggctttcaaccagcattgacccaatcttgtgtccagagctgttgctgtaggtggtatcatgtatcaagctgaatagtgaggtgacattccccaagtcttctctcttgtcttttttgactgtgcatcatagatactgtattacccaagaacacacacctgttcgatctcttttcctataatcacctggagtcagatgaataccgtaaaggtctgtggtaagactagaagcctcagccagtatgaatgatttacattagatgcacaccaagctgctttcggagagtccagatttatggggataagagcatcactaggtatatcaacagccctagggtggatacctttgagcctgtaaatttggctctgtgttggacgatgaaccatggaatacagaagaagctcccttctctcagctaaagcctattagcaaaaatagagccctgaggacattgtattttaagtgtatgttccagtgagtgggtcgttgctgggtcaagttttataagtctttaaatcccatactgttgcctcctggactgtagaaatagtctcttagaacaagagaaaggaagacaatagctaccatttattgagaactgtgataagcactttacatatgttgcatacttaactttgagagaagtacattattattcccatgtttcagataaaaaaattaaagctcataagaattaagtggctttcttacattcacacagctagtaaaaatgttttttgctcaccattgtattcccattgtcaagcaggatgcctagcacacaatgatgctcaataaattttgttaaattcattaataaatgcagtggtaaaggcagtatttgaactcatgtctgcttgctgctgaactctatacacttaacacattactattatcttgtcccgcatgatacatgaagggaatagcttggtaacttggaaaagactatttactgtctgagttctaggccaactgtagggtgtctgtatttatttcccattatgctataacaaattaaccataaacttcatggcttaaaacaacacaatgtattatcttacagttctggaagtcagaagtccacagtgagtttcactggctaaaatcaaggtgtgttcttgccactatataacaaggatccactttcctttagtttccaataacaggctccttatttctacctgagccctcactggcagcacctttaatgccatatttgtaataacaatctgttcatgacaatttaggtttgctcctcacttttttctgagtcctctctagtagagccattaatatgcatattgctactagcagcctgttcaaggtaatgtaggctctttctatcatgctcttcaaaattcttctagactctgcccatttcccaatctcaaggccacttccgcatttttaggcatttataacggcagaaccgcacttccagataccaaaatctgtattagtttcctagggctgccataacaaattaacacaaaatcccttttgccatgtaacataacatattcacaagttctaaaattagaatgcagtcattttggtggggccattattctgcctaccacccggtctttcatgttcaggcagaggtggctctgtgtgtgtgtgtgtgtgtgtgtgtgtgtgtgtgtgtaagttaatttcagtagagaatgagctagagtagagaaagagaattaaggtgagatgtgtcatggaagaacagtgactgatgatgctaactttgctcaatcaagaagtgtgatccatttaaatcatgctttcagtgatctatccaatcagataaactactctcccttcctgggaagagtaaggaaggaagtagagctaaagatgaaagttcttttcgtagcacatccctgcaaaggatgggagtattgttttggtgggcattcccttttctaagagcaaagatggaaatgtggagagaggagaaaaatggttcccattacattattgtgttctggacttagagatattgttctgccccaggtctaagaatattgttccaagagttgggagcaggcagcagaggacagtactctttagatcacccagaggccaatctgtaaggattcaatcctggggcatggtagctaatggaaaagtcactgtcacaagtgatgccaggagatggggcaacacatattgcctgccttgtatgcatctagcgtctgtgtctaagtgaaagcagattatatccagaacttccctggaaaatagaagaaagagcctgattggtgtgtatgtgtgtgttaggggttgaggggtgggtaatgttcctgccagtattcgtaaatcccacctgcttttcctgtgatgcttcctgtgttggggataggagggtgggatggttcagggtcaattttatggatccatatgtatctaaggatgtgtttgttttttgggaacattttgtataacaaccagtttcactctagctccctccttgatattctaaacaagctggatatctccaaagcttaggccctctccatacttacagcagctctgactggagattaaatcaccccttatactgctgacaatgattaggccatgggacccatgaaagagcctccccagagtccagcatcccctgtgggctccgtgtgtcatcaagatgtcaatccaactgctgttcctgcagtctgcaatcagcagggctatgtttattcagcggtcagtgtcacatcaatttccttctgttgcaacaagtataaatggattctaaatatttgcctttgggaaatttctttagagggaaactcactaaagctaatttttttagctttttggtatgttctctctgaatctggggatttagatatataaattagcttctttggtcttttcttgcccagggtcacaaccttgcctccaggataataccttctaagtgtttgtgatttgaagggcactacgaagatcctcacaaaaactacctcccagccgggtccctgaaactccatcattaaccaccttcatcagcatttctcttttaaaatccttattcattcctgttctccttctttctttctcacacacacacacacacacacacacacacacacacacacacacacacggggagagagagacagagagagagagagatagagaagtgaagtatatagtatcctttctagggatgcttttcttggcttggctccaatagagaattttgttgggaccctctatatatagtcgtgtaccaaataatgacactttggttaacaatggaccacatatgtgacagctgtcccataagattgtaataccatatttttactgtaccttttctatgtttagatacacaaatacttgccattatattacaattgcgcagtattttgtacagtaacatgctgtgcaggtttgtagcctaggagcaataggctataccatatagcctaggtatgtagtaggctatgccatctaggtttgtgtaagtacgctctatgatgtccatacaacaaaaatgcctagtgatgcatttctcagaacatatccccattgttaagtgatacatgactgtagtcatcatcaaacatttattaagcacttaggtcaggccaggctctgttctaggtgatgcagatataatattaaatataacacagtcctgcccttataaatctaatggtgaagggagaaatgtaaagaaatatgatggaaatattacattgtcatgtgataagggcgacaataatgccctacgtaggtagggtcaacgaaggggaaggaagctgggacaaaccaccagggcctgttggtccagaatgggacccagggtctgtctatgttataatcaattcaaaccctaggtaaataaggtaagctaggctgcctttcttgagacagtccccagattgttttcacagggcccaaacactctcagcaaccatgaacagtggatgttgtgggacctcagaagatggaattggaaattcaggggactaagtcagagattatttgacatttaatactggatattgaggccgggcgcagtggctcacacctgtgatcccagcactttgggaggctgaggcgggtggattgcctgaacccaggagtttgagaacagcctgggcaacatggcaaaaccccatctctacaaaaaaaatataaaaattagccgggtgtggtggcatgcacttgtagtctcagctacttgggaggctgaggcacgagagtcacttgaacctggaaggtggaggttgcagtgagctgagatcacactactgcactccagcctgggtgacagaatgagaccctgtctcaaaaaaaaatttaaaatactgggtattgcaggatggcaagtaggatgtggagaggaagagaattccaggcaaaggaaacaatgcgtgcatgcaaaaacaaaatacaaaaaactgaattgtgtagtctgggttaataagatgagtgcatttgatggatgtggtagaataaagagatgttaggaaatgagatcagaaatgtagactggaatcagattttgtaggaccttaaacatcctgctaaataatttgtagtttcatttgttggccatggagacccactagaaggttagttggtttgtttatatttaggaaagaagattcttttaagtttccttaactctactgaattttcaaaaatcaacctacagcaatccaaacttatctgtggagatacattccaagaccctcagtggatgcctgaaacctcatttagtactgacctttatatacattatgttctttcataggtgcacctatgataaagtttaatttataaattaggcacaatactcttgtgctttggggccagtattaagtaaaataagggtacttgaatacaagccctttgataccaaaacagccagtcggataccaagacactttctaagtgaactaacaggtgagtagtgtagacggcatggataggtcggacagagggatgattcacgtactgggcaggataaagcgggatggctcgagatttcatcacattactcagaacagcttgcaatttaaaacttatgaattgtttatttttgaaatttttcatttaatattttcagactaaggttgactgtgggtaactgaagcctcagaaatcaaacctcaaataaggggcgatcactgtactgaataatatgtcaagatgagctatgagcttttaacttagtgtttttcttctcccaaaccaaatattggaaactttggagtgtttagaaaaggagaatcgaaaagggaagtaaatgcagcattttttttaattgttaaataaagggctgggcttggaaatgttcttaggtaatcctggtggatttggtatatcatgtctgagaaaatgtggagagtgaagggcaggtttaaaatttgtctcatgttagtttctgaagggagatagcctggcattgcacagtgcctcacatttctatcgtatcacttaataattgtgcaacctgtgcttcagatttatcaatgtataaaagaggagagaccataggctgttgtaagtattaaatgacataatgcacgcaaaatgcttagaaccatgcttagttcatggtagccactcaaaaatgtcgtcagaactattactactcagtttaatgctcctagcacttaacacagtgcttggcacacagtaaagaggattcaagatgtttttgctagattacatggaatggtatggaagtgtgcagggtggtgtagagggttctcccattatcttgccttccttatactgcaatgtgctgacagcacctccattttataccctcaatgcaaggatatcactacttgtctagaaatggttgctcaaggctgagaagtgacagcaacacagagcctgggattgctgccaaatttcaagaagcacagattgtaacaaagtaaggggggagggtagagaagaaaagtttgaaaacccaaccaaagtcagaagccattttgttgtcggctgaaataatgcctcatagagtttcaggtggggcaggcagtgtgaaaactttgggaatagtcagtgtcaagttgtggtgctaagggaggaacccagtagtgctcaggcctgggcaagtctggcttcttggggcccagcatttagaaaggccctgtgtgttttgatattatgctgtcactatcttgaagttcttgataatttgttaacaagggccgcctccccccattttcatttggcaaatttcactggttcctgcaaattatgtagttaatcctgggtgcaggctagtttttgaaccatgttgggctagtattcttctgaacctctatctctttgatttaattacagaagaaacaaaagtcataacaaattatatctgtgcaggactaaaataaaatgagtagtgcctcactccctacatccaatcatgctttccaaaagtaaccactaccaataatttagcgtgcatcttcagaattctttatatgcctacattttaatgtatttttaaataaaatagaattacattgttgaagtaaatattaaaaaatatagcatttttgcatagaaatatttatttccctcaatcccactcccctttggtgaagcaaccactgttaacaattttgtgtgtatcctccaatatttttttgaaattaatgaactttactttttagagcagttttaggttcacaggaaagttgagtagaaagtgcagagttctcatgcactcctgctctcccacatacacaatgcccccacacccccgccacagtgacatcctgcccagagtggtacattcatgacaattgatgaaactatattgacatcattattgaaactatcattaccacccaacttccatgtttactttagggttcactcttccaaatatttcttgcatcacttaacaatggggatacactgagaaatgtgtctttaggcagttttttcgttgtacaaatatcatagaatgtacttacataaacctagatgatatagcatactacacacttaggctctatcgtatggcctatttctcctaggctacaaacctgtatatcatgttactatactgaatactgtaggcaatttttacacaatgataagtatttgtgtatctcaacatacctaaacgcagaaaaagtacaataaaaatacattattataatcttacaggacaactgtcatatgtgtggtccgttgttgactgaaacatgattatggggcgcatgactatatagagattttcaaaaagcaaaatgggataatgcaatatgtattattatacagcttgtgtgtgtgtgtgtgtgtgtgtgtgtgtatgttaacaaacacctttctacgtcagtacatatagatttgccacaatcttcttgagtaaggatatagcactatgttgtatacctatattataatttatccaatttgctgttggtatctatgttttctaaacaatacaatatacattcttatacatatttcttatgcatgcttgctagtatttatacaggataaatttcaagaagtagaattacagaatcataggatataaaaatatcaaattggcaaattggcattcacgtacctgtggttggactgcacttgttacatacttccctctgagccttccatccccacctcgagctagtgctatatgtcacttaactcagtgacatcatcatcaacagacttagcctctgcagttgaaaatgctagagcaaacagaggagaaaatttacttgtgaatcataatagctaacctgtactgaacagttaagccatgtgccaagtattattctaagcactttacaagtattaactcctttaatctgtataaccacacccagaaatttgtgcattattatactcattttactgctaagaaaactgacacccataggattaaatcagatcacacatttagtaagggcaccaggatctgaagcaggattgtttgacttctgagtctgtgctcttaaccactgcacacaccgtctctagaaagtttaatgccatctttatgccaaagtttatctacctggtttatcctttaacactattattgtatttattcatttacttgtcttttcctcccactgtgctgtaactctttgagaacagggtacttgtcctaatattattcatatttatatccctaattcctaatttaatgtctaatttattgtaaataagttttttttttttgagacagagttttgctcttgttgcccaggctggagtgcaatggcacaatctcagctcactgcaacctctgcctcctgggttcaagtgattctcctgcctcagcctcccaagtagctgggattacaagcttgcaccaccacgctaggctaattttgtatttttagaagagacacagtttcactatgttggtcaggctggtctggaacccctgacctcaggtgatctgcctgccttggcctcccaaagtgctggattactggtgtgagccacatgcctggccttgtaaataataagtttagttgaataaataacaatgcctccgggaggtagctattatatccattttacagatgaagaaactgtaagtcaatgttaatcaaatagtatcctagaaaatagtagaaagcagaatgctggagctgagatttgaacccaagacttttgatacttcgtccagtgtgctttccaccatgcctaagtagtctccttcacttcctccttcagagggctatggagagtaacctagcaaccatttctaagctggaaaatgtcacagccggaagtcttcagtcccctagaaggaaaagagcctgatggggagagggtccttggaaaagagaatttctggaagtactacatttgagaataggtggttaaagtgggagttggattagtaaaggaatactgcatagtagtaatacccattctttatttcagaatttcttcatgacagacattgatctgtgtgatttataagccttgtctctttttaatgttcacaatcccattagatggttattgttatctttgttttgcatatgaaagaatgggagctaagaggccaagtaccttgcctcttattcgttcaacgaataagtggtgaagcagattccaactcaagtctatgttacccaagaacctacattttaagcattttgttaccccctggatatgacagccaatgaagagggggtattttgagaagagactataaagggaaattgccttccctacatcctgggggaccttatcaaccaggaaacaaggtagagaaaactgtgcagcctgagccctgctgggttgcggggggctcacagaaagaagaaatgtgatttttttttagctaactacggagaccagccattccaatgtttgaatctgggttcgcagcacatgatgtctttatactcttaacctagaaatggcagagttattttgggcacaaagcaagagctgtggctttaaaaatatgccaagtgtatttatctcttccgctccaagattactgaaaattagcccagctgtagcttgggacaccaaacagccaaaaaatcttcttccagctcaactcattccacccaaagagggtgaaatacccaggagtagcagctctagcggcctctgggtagtggtattagattggcctccccattgctaagcctgacatccaatcacacacacaccactctcccagctgctctgtagatcacaatgctaggcctgtgaatggagctcaactccgtctcttccctcatccccaaggcttcacaagaagtaaacaaaacaaacaaaaactatttgattattgagccaaggagtcaatgtgagaatagtttttcaccttcattatcaaatgcctgtgtggagctgaatgtggtggctgacacctgtgatcctagcactttggggaggcagaggtgggaatattgcttgaggccaggagttcaagaccagcttgggcaacacagcaaggccctatctctctctctgtctctctctgtctctctctctctctctctctctctctctctctctatatatatatatatatatatatatatttttttttttttttttttttttgagacagagttttgctcttgttgcccaagctggagtgcaatggtaagatctcggctcactgcaacctccttctccagggttcaagtgattctcatgcctcaaactcccgagtagctgggattacaggtgcctgccaccatgcccagctaatttttgtatttttagtagagacagggtttcaccatgttgggcaggctggtctcgaactcctgacctcaggtgatccacctgcctctgcctcccaaagtgctgggattacaggcatgagccactgtgcctggcccctatctctgtatattaaaaaaaaaaaatcttagccaggcatagtggcgcacacctgtattcctagctactcagaaggctgaggtgggaggatcacttgagtccaggagatccagtctggcagtcagccatgacctcaccattgtactccaacctgggcaacagatatagacgctgtctctaaaaaaaaaaatcctgtgtgatttaggacaaattatcttgctgtaatttaagccttcatattccttttttataaaataaatatgctttaaatatgtatttagatatacacttataataatagctttaattaattgtaattaaatcatttaaaattaaatacatgcaaaataccccataaactgtctaatccataataagcaatcaatagtccttaaacaaatgaatcttctgttgctctgatcttaataagtaaaatttaacgagtttttactttgcaccatgcacttatgctatgtgctgtataaggatagttacatttaatctataaatcaaccctatggggcgggcactcttatgaactttttttacggatgaaaactgaggcccagagatatgaaataatttgccaaacatcaccataatttacatgatgtagccaggtttaagcctactattctgattacagagcctaagatcctacagagaacagggagtatatttttacattcccttgtttccatggaaaagtctttccactgtcaattgaaggactaagcagcagcggggaagtgctggaaatgctagcccaggtgggcttagctttctccctctctctctgatcctggacaggatttgggtttcagaccacgattctcctgtgttttgtgggctgtgattactcagattaggtttgcccaattcataaaggactggcgggggttgggggtgaaggtgtgggagaaggcggagcttgtccagtcggtccaacaaaccccacagatggcgaaatagggggcggggaaggagcttgagatattttacaacctgggctgtttcagtggttgatggcggatggtttttgccttttggtcagcctgagtatatactatcattctacaatcggccaaattctgacagagagggagacagagagagaggttgattaaattgatgcccaaaaccaagaaggagcaaagaaatcggggctgtttgaaaaagactgcagtggctgacttgggtggtgagcggaaataaggaggagggagaggcggggtgtctctgcgcggaaagcctggaagttcacttgcaaacacagaatctgcacagccttcggtgccctgactctttcctgggcatccagaggcagcagcagccgccagcgccaaagaacgagcagtccaggggctgggccggaaacggctataatcatttaatagcctttgccggctgcactgacttagcagagtgggcggtaggcaggctccagagtgctgtctggcaagatagtccccggctttaatcaaaatgatgggttttctggaagctctttattaacctcagcactgaaatcccagagctggtaacaaagggatgaatggggagcaaaggggcggggccgaaacctggaggccgggctgcatccgcaccccttcccccacctccactcctttcaactcattctggcttagggctcctgctggcatctctgtgcctcccaaatagtagtaacaaaacaggcaataaccataataattggcacatttgtataacgctttagcattttcaaaggatgaccttgttatacagctcaggatctgagtctcctagctggagtcagactccctagatttgagtcccaggatccaccagttagtgaccatgtgaccattagtccttagtcccctcatctataaaacagacacataacacagacagagatactagaaatgtctacttcatagggctcttgtcaggaccaaaacctatacgacgtgcagatttgtttaactctgttgcacacacataggaagggcacagtaaatgttaactacatcgacaaccctgtgatgtagacaggaaggggatcatctccattttatggatgaggaaactgaggctcagagatatttatgtaaatggcccaggactatgcactagtgagagaaccagggcaagtcctcaagaacagaaagagaacaaagcaagatgaagagaagatcagaaaagtgaacaccctccaacaccctccagcacatgcccctctgagagctttcctgaaaatagtatccttggtcaaaatgagtttatgttctattagggaaagtcagtgtaaatcagaaaagccctcctggccttaacagaacagttccaaatgcagatgagggtgagtttaacaggcctggcatttgcttcacaatcttctggccctttcctggcatttgccttggcaaagactctgacctgatcaatcctagtccctgaggctcaactccatcaactcaggcagccagggttagtttagcatgaaagaggaaagctggaaattttgccaaaaagattcctgggcagtgcctaagggaagtgcccaaattggattataggattacatgaagtggccagctacttccagagggcagggttttttgtttgtttgctctgtcacccaggctggagtgcagtggtgcaatctcagctcactgaaacctccgcctcccgggttcgagtgattcttatgcctcagcctcccaagtagatgaaattacaggcgtgcaccaccacagtctcgctaatttttatagttttagtagagatggggtttcaccatgttccctaggctggtcttgaactcctggcttcaagtgatccacctgcctcagactcccaaagtgctgggattttagatgtgagccaccattcccggccccagagggcagtttttaaagtagaagtgaagatctgtatgcatttattaaaatatatgttgttctgattttaaaatatatccctaccaattgtgaagatatcggctaatccaataaaaaagcaaaaccatattttgtataattatggtcgtattctgttaaataaacttttaaatcctattgggttgtaatctgtagtctgggaagggctctgcctaacgattcagacccctaccagatttatatgtgtctgaaatcctccttctagcctcttaacaggcccattcatttgggtcttgactgcatcctcagtcttgtctttgcctgagggtgagctaggaccctgggagcataagggaggggacttgccggagatcctagaagggaaaggaggcagcactgaaagaagaaacatttccttgattgatcatttgctgatactggcccctggttggggttaggggtagaaatgtgcttcttccgttttcatcttcttcaaaagggagtatctccatgattctgccccaaaggcatgacattttataggcaaagccagccaagtgtcttgagtgctcttaaccaaaaggaattcagattaggaggtcagtcagtgtttgtcagatccttaagcttttgttttactggaatgagtcacagtctacatgctgctgagctctcagagatgtttgttttatacaacaaccagaacaggtgaggcacagtggtctgtgagggactggagagaccacaccttgttctgctctgcggaagctggacatgtggaggaggcacctgactagatctctgcctcctggagtttaggctgagtcatatagaaccaggaagctcagtgacatgttaaagtggattaactcttggcagtcctgctgtgaggggctccctctgccaatacacacagccattaatgtcctttaactgtgcaagatgaacatatctctgtgttctgcatctccagatgacagtgcttaggcctcatgcagagtcctggttatggttgaagaaaaatttccattttgggctctgagggcaactaaaggactgtggagtggtgctgaaacccagttttaggtgccgaatcagaggtttttaaatacatttctctcttttgtctcagtctcttagagacaggacctgtattttaaaggtaaacaggcagattctggctgagctcaattgcagatttgattaacttagatagatcaaagtcattagtctcagagaaaaaatttgtttctcatccctaaagtgctattgtgtcagctctgccagggtgtaaggaaaagggtttggaagagagaagaaaatttcttaccctctctcgtcactgcctgctgtaaatttgcagtatcattatcttggtctcctaagccctgagagctgcattatatataattgcccatatgtgataccatttactgaattcttgcattgtgctaaggatcaagcttagtactttacatgcattacatcattgtctttagggaccccaaaagtgcctcattggagagttgtttggtctgctaaagagtgggtaccactttcacttctcacatcagtcctttcattcattcatccagcaagtatttactaaacacctgttatgggccaggaattgtgctaggcactggtgatacattggtgaataaacagatacattttttgcctttgtgaatcttacagtggtagagaataataggccaagggggtgctgcttggctaggaatgtcatagaatgcctttccaaggaggttacatttaatacagacttgaagagtgaggagtcatgctaagaatggatgagaggctcacgcctgtaatcccagcactttgggaggccgagacgggcggatcatgaggtcaggagatcgagaccatcctggctaacacggtgaaaccccgtctctactaaaaatacaaaaattagccgggcatggtggcgcgtgcctgtagtcccagctacacaggaggctgaggcaggagaatggcgtgaacccgggaggcggagcttgcagtgagtcgagatcgcgccactgcactccagcctgggcgacagagcgaaactccgtctcaaaaaaaaaaaaaaaaaaaaaaaaaaaaaagaatggatgagaaatcattcaagacaaaagcaaaccagatgtgtaaagatcctgaggcaaaaacaactccaaggagccaggtatggtggcctgtagtcccagccacttgggaggctgagacaggagggtcgattgagtccaggagtttgaggttacatcaagcaatgattgcaccactgcacttcagcctggttgacagagtgagaacctatctctaacaaacaacaataaaaaaacaattccaaagagtgtttgaggatctgaaagaaggcctgtatggttggagtataatagtaagagggagatttgtagatgagagtggagaagaaataaaaatcagattattgaagggacttatgtatcatggtaaggagttttttttttttttctcaaggcagtagaaagcttaagcagaggagtgatataatctgatttatatttttaaaagagtttgctatatgtatgttatgcctcatttttttttaaattttttatttttagatggagtcttgctctgttgcccaggctggactgcagtggcacgatctcagctcactgcaagctccacttcccgggttcatgccattctcctgcctcagcctcctgagtagctgggactataggcgcccaccaccacgcccggctaagttttttctattttttagtagagacgcggtttcactgtgttagccaggatggtctcaatctcctgacctcgagatctgcctgtctcggcctcccaaagtgctgggattacatgtgtgagccaccgcgcctggctgttatacatcagtttttaaagagagacattaagaaataaagatgactctggctactgtgtggagggttggagagaagcaaaagtggaagcagactgaataaggagactattgctgcaattcatataagagatgatggtgtcctgaaagagtggtggcagtgaaaattgggagaagaggacagagtcaagatatatttaggaggcagaaatgacaggtcttgatgatgtattataaatggagaatgaagaatagaatagagaaaaatgaataattagctttgaactttctggcttgagaaatggggtaaatggggtgtaatttactgaaactggaaagatttagaaaggaatagattcgaggaatcaagagtttgatttcagatttcttcagtttgggatgcccatgagatttccaactggggataccagataggcagttatacatgagattggagcacagagagatgtgggcttaaaatataagtctgcatctcatcagcttattcatatggtatttatatctatggatatggctgagatcccaaaaggagagagtgaagagaaaatagagaagagagtctagggccaaacccaaggaagcttcaacacacagatgaggagactgacaaaggaaactgtcaaagaacagtcagagagaaaggtcaggagaatgttttgatggtgggggccagaatatgctgtcccaaaataagaaggattgttgagctgaaggcaagttaaaagaagcagatacaggctgggtgcagtgggctcatgcctgtaatcttagcattttgggaggctaaagtggacagattgcctgagctcaggagttcgagaccagcctgggcaacatgatggaacaccatctctactaaaatacaaaaaaaaaaaaaaaaaaaaaaattagccaggcatggtggcatgtgcctgtagtcccagctactcaggaggctgaggcacgagaattacttggacctaggaggcagagactgcagtgagctgatatctcgccactgcactccagcttgggcaacagagcaaggctctatctcaaatttaaaaaataataatcatgataataataaaagaagcagatataggagaggtcttctgccctccctgtatttgcctaaaaaaccataaatttacaaagacaaaagttatcctacttccacctccctcctctgcctcccaccaccagggagaacaaaggttaaccactgaagataactttggactcttattggcctggaaatggtactgctttacaaattagcctttatctgccattcatttgccttcccccaagtagctacccattagagactcaaagtccttaaaggtcttttcctttgtcttacacttctttaaaaatttattgttctttgttgaagatgctatataagctggaattctaagccacctttttgagaactgctcattctctgggtgtctgtcatgtatatatgaaatgtacatgttaataaacttctgtttccttttttttcttgttaatctgccttttgtaacaggggtccagtccatctaagaacttattggggttattctacatgacaaagaactcatgagaataagtgtttcaagaaggggatgacaaatgctgctgagaggtttgataagatgaggactaaaatgtgaccattgattgtggaagtaatataatgaacttgacatgagttatgttagaaaattactgctcagggacaccaaattagaggagactgagaagtaataggaaattgaaatagcagttgtacccaaccctaaactgtaattgaacataaacagtttatttgatggagcttttcacgtgtcaaccaaaggagcagtgttagatacataaacattgctatgatgtcagagttccaatgtcatggccactgggatcactttgcccagacagaccattacccttcctctccagctctgacttctactcttctagaagtcactggtatactttatggtgtgtcttccaatcagactcttgggaatgtcttttattgaaaactcctgtggatgcataatcattttcccaagactcagggcagatttcacctcctctggaaccccattaactttctcaagtataattaacaatttcttcttctggagtcccacaatactttacatatactttagttattgcatgtattaagttggtttctagttgcttgagtgtatgtccaactagactgtgagcacactgagggaaggaatttggcttggaaagtaaaattggctcccagtgttttatctaaacaaataggctcaatttacaacaggattccatcctcttacgctgtgtattcccatctcttccatgctgcatcccaccacccttcaatgttattacaataaaattaagatcaaataatttattcagctaatttttcttgttttggacaaaatagacatcctaatacatttatagccaaagtttaatctagacactaaaaggagcatattttgcctttaggctctgtatttcccatcccgttcccagtcaagataatcacaactgtattctttaggaaattcttcacaaagaaccaaacatatgttactatgaaactagattcttggtatcctggtgaaaaaacctgccctcttgcttgtctgtaaatactggccttggctgggtgtggtagctcatgtctatgattccaacactttgggaggccaaggtgggaggatctcttgagcttcagtgtttgagaccagcctgggcaacatagtgagatcccatttctataaaattttttttaaaaagctagcctggcatgggagcttgtgcctgtagttccagctacttgggaggctaagatgggaggattgattgagcacaggaggtcgaggctgcagtgactgcatttcagcctgggtgacagagggaaatcctgtctcaaaaaaattaaacaaataaataaataagtaaacacttgccttgccctcagacttgaacaaacaactcgtgatttttctggggaggttcagcctgcctatgcagtactcctgtactctaccagcagtgtggcatcaagagcatgtgttgaccctgttaatgatttgtaatgttttgtctttcagaaccagaggcaggagaagtgtcccctccagtcggtgcgggtgtcaacagcaacagctggacctttaaatacggaccaggcaaccccaaacaatccggtcccggtgagttgcccgacaaattcattatcccaggatctcctgcaatcatctccatccggcaggagcctactaacagccaaattgacaaaagtgacttcataaccttcggcaaaaaggaggagaccaagaaaaagaagaaaaagaagaagggtaacaagacccaggagaaaaaagagaaagggaacagcacgactgacaacagtgaccagtgaggtcctcaaatggaaacaagccacttagccagtttttgtaataatggcaaatctctcccatgtagcaattccctgctcctttttcctatctacatgagccctcttagagacctcagaaatctgcagaaagttccctgtgtctgtctagaacgcatttaacaggttttgtcgtaaaagctttactaagtctggtgttaactctttctctccactctggcttgttttcagaacctaaaaagcagacccaagtttcctttctcctccgccgcaaaggagaggcttcccagccccgccagtgagaggttggactctctgccctgtgctccggggatcctgtcttgatgacacttgcagggcaggctgaaaagttttgagattgagcagcttgggagtttgtggccactgggtatgtgtggctaccgcgggtatgcgagtgccagatattggctgagacgagccagcttagactaattggtacaaggaaggcaagaaaacaaagacaaataaacagcggaagttatcagtatggaggggaagtgtaaacttaaagggaccagactttctaaatcttacaactcaagaggtggcagccaccctctaggagacaaaactacccccactgacaaggctttaggagaccctaaagtctgttggctgtgacgtcattatacctaaaatctgcatcatacctgcaagccaacagttcagtgttttaacagagaaccaccctgggaaacagaagcagatctgatgtgtttcctatacatgtcctgtgctcactttattaaaaattcttttgcacacaatgtttatgaaaaggccagatccttttccaatacttatgcaaaagcaaaagaaaaccccgacacctcacctttcgctgtttgttgtttcatagatttatttaaaaaaagagaaagtctatagctataaatctttaaagagaaatatgaatacaattcccctaaactctcctcaaaagagaattcagtctacagccatttaaatgatcattgctgctacagaagtgctttaagagaattgcctgaaacatctgtattatatcggccacctgccaatcacagctttactctttcaggtcactctggggctgcctcttgcatgtattactaaataaaatgatctctctttctctctctctctctcttttctaagaaacaattatgtgcactttgatacacaaccttctctaaccaactatatatcaagacccaaaaattgaagaaaaatattgttttctcatacagtgagcagatttttcaatctactaattctgtgacttgtcttggtgtgctagcctacaccttctctttggtttagttttccttttctataacactctgaattgctaatcttactaacacctatgatgttacctgaaatcaatctcccatatgtatgctgtatgctatgctaagactcctgaaatatacttactctgtgcttgtgtatgtgaatgttaatgcaactattacctagagtgaactttaagctttattgttgaatgtaattccattatatttccttttgtacacctgtgaaaaagtggagtagtgtttttttaaccattgttaatcagcttttgtgtatgaaagacacagtaaaatttctttcttaaatcaagatactggtgattcaaggaattttatttatggtccagccaagagccatctcgtgccaagacttctgctggcaagggaatggataaagctgttttgttctagtaacaattttggaatgaatactgacaatattccatgagggtgtgcaagcacaaattttaccaatctgacctctttgaagttgcagaatgctttgaaattctaatggtatctgaaatatcagctcatagaaagtaacaaaatttgctgtcaccttaaataagacattttaattttgttataatgtacaatttagaagtttgattaattatattatctatttaggcattaatataaaagaggtaggagtctgttatttaaaaaaagcattaaatttaaaaaaaaactgtcttgtctacttttagcttcattctcccatattttgaagggtgtgtaacttcagctctgcaggattgcatggggtaaaacttgttaccaacacatgtgaaccattgctacattgtaggttgtgatcattttgccccactgaagcccatgtatctgaccttacgtgccttttgaactaggagaatcgggctaatttattaatgatgataattataatgtatctgtacagcactttttacatttgcgaagtgctttccaatccatgttagttactagttattacagctgtaaggataaaacacgtcatgtggattcattttgaattggtgctattggtatttcctctgttattgctaataaatgaaaatggtggtatgaaagaaatggtggtcatttctaagaataggaggaaatagaacactgataagcaattaatactgaagaagattgctgcagtatgaaactcactgtaacactctcttatcacgttagcttttatgtccattactaaggcaaaagccccagtggaatcaagattcaaacttcatatcattagaatgggcagccaggaggttgctgcgtcactttgtagttacactatttcagttttctctaataagaattgcaacaaacccatttttatcacaagagcccttctaggcatctttttcattacttgtttagcccttgcacctctctacaattggaaagccaagtgacaccccaaagaaatgaacttttaggtcagggatagtggctcttgcctgtaatctcagaactttggaaggccaaggccagaggatggcttgaggccaggagttcaagatcagcctgggcagcatagcgagatcccatctgtacaaaaagaaataacttttattgagtacagggtgtatgccagccacactactgcataggttcagctgtgacaaatagattgttttgtccttttgtagttaaatttgtataaatataagctttagatgctgtaggttctcagttaggagcaattttgccctcctggggacatttggcaacgtctgaagtcattgttgcttttcattacttgaagtggagggtgctattggcatctactgggtagggggcaacgatgctgtgaaacacctggcaatgcacaggacagccccctataacaaaggatcttacagcccaacatgtcaatgtctcaaatcaagattgagaaaccttgagatagagtgaccatataatttgtgtagtccacttttgaaatggaacaggagacaccattcgttattacttcaggattcaagatgtaaactgggactgtcccaggctaactgggatttatagggactctataaataaactggtatagctgtgccactaactagatggggaatttgaggcaaaccactacttctctcagtttttcagtcatctctaaactggtcataattataatacagaccttatagatttgtgaggtaatcttaaaaggttttagcaggtctggcacaccatagtactcaataaatattattatttattaatccttttcttccatttccttacccccttttcagagatttagctattagacccagggaacttttcctactgactaaaatgtgaatgagggatggccaaaaaaatcaacatagtcttggcaataaaaatattttatttactcctccgctcttttgctcaccccaggaggaaaagaaataaagtcagtttcataactccttacctatttctatcataataataatcaaatccctaagtagtcaagtggccagtctgtttgcagctatttcacctcaattattggtgatctgaaagccagaaaccaaagggtttgaagtacaacagcttgagagagaaagagaagagtc

SEQ ID NO: 439 - DNA, 185296 bp, Homo sapiens
  source 1..185296: mol_type = genomic DNA
ctattaatgtgtattctgaaaagttacattctctgttaaagagttacttccttgcaatattgaagatgatttattgcacctttaaatttctactctttggctccatgtacttgtctttgagaagctgagaaactgtagatttggttaagaactaaagttctctttccaaaaactattattgagacctttcattgttttctttctttcctcatttttaacttttctcagtcatggtgtccatgggttggctggccgaatttgttcctgaaattatcagactctggagtacagatagcatgcttctctaactttggggtaaagataagtaagtcactctaagcctgagacattttaattagtaaccctttgctaatagtgcagtgattaaaaaaaaaagaaggccacatcctcaactggttaaaaaatactgttaagagaaaaccaacttctcttggagaaaatattaagtgcgattatagaggaatacatattataagagcctatctaaaaataaagatgagaccatttttcttttcagctgtgaagaataatatcatagactttgtctctgaaatttgaaatctaaattatatattcatgtgacttttcaatgaaattccaagagcccagttttatttttttcaaaatatattgcctttggtgaatcttaagaattttttaaaaacccacataatgcaaagacacttcaaaaaaaaaaaagaggaaaaataaggatagggttaaaccatgctcttcaaaatcccaaggtttctgataaatattcaaatcataatgggaaggaaatgggatggtatgatttttttaaagtctagcttatattctaaaagattatttttccctctaatacttttcaccctccagtcaaaggggagctgctctatgtggcctgggaaattaccaagtggtcaaactttactacagaaaaagtggagagatgattttgtcctcattgtaatgttaggtttttactataattccctgaatagcaaacttggaaagcagataacatgggaatacttggattctcctgtatatttcaatttggtgacatttaggcacatttaaagaagtgaacatatagtttctctttttcatacatatattgtagaattatttccttgacaatagactaaaacttaagaaaataacaagttaatgagaaggttttcagtatttgctaggaatgcagtaactggttaggactgtgggcgccgctgttcactaatctggtagatacaggcagtacacacaggtcaggaggaggaaaaaaaaaaaaaagaaaaagaaaaaagctctcgtgcctcttagaacctccataaccgccagattgaaaactgactgtccaagactgcctaaatcctacttctggatgactctccagtcagaattctcctgaaaattgggttaatttcagctcagaaaagcagaaacgatacccttggtactggactggaagaaaactacgaagtgagagagccatgaagattcagaaaaagctgactggctgcagcaggctgatgcttctgtgtctttctctggagctgctgttggaagctggggctgggaatattcactactcagtgccggaagagacagacaaaggttccttcgtaggcaacatcgccaaggacctagggctgcaaccccaggagctggcagatggcggagtccgcatcgtctccagaggtaggatgccgcttttcgctctgaatcctagaagtggcagcttgatcaccgcgcgcaggatagaccgggaggagctctgcgctcagagcatgccgtgtctcgtgagttttaatatccttgttgaggataaaatgaagctttttcctgttgaagtagaaataattgatattaatgacaacactccccaattccagttagaggaactggagtttaaaatgaatgaaataacgactccaggtaccagagtctcattgccttttgggcaagaccttgatgtgggtatgaactcactccagagctaccaactcagctctaaccctcatttctccctggatgtgcaacagggagccgatgggcctcaacatccagagatggtgctgcagagtcccttagacagagaagaagaagctgtccaccacctcatcctcacagcttctgatgggggtgaaccagtccgttcagggaccctcagaatttacattcaggtggtggatgcaaatgacaatcctccagcatttactcaggcacaataccatataaatgtccccgaaaacgtgccgctgggtactcagctgctcatggtaaatgccactgaccctgatgagggagccaatggggaagtaacgtactcctttcacaatgtagaccacagagtggcccaaatatttcgtttagattcttacacaggagaaatatcaaataaagaaccactagatttcgaagaatacaaaatgtattcaatggaagttcaagcccaggatggtgcggggctcatggctaaagttaaggtactgatcaaagttttggatgtaaatgataatgccccagaagtgaccatcacctctgtcaccactgcagttccagaaaactttcctcctgggaccataattgctcttatcagtgtgcatgaccaggactcaggagacaatggctacaccacatgtttcattcctggaaatttaccctttaaattggaaaagttagttgataattattaccgtttagtgactgaaagaacactggacagagaacttatctctgggtacaacatcacaataacagcaatagaccaaggaactccagctctatctactgaaactcacatttcactactagtgacagatatcaatgacaactccccagtcttccatcaggactcctactctgcctacattcccgaaaacaaccccagaggagcctccatcttctctgtgagggcccacgacttggacagcaatgagaatgcacaaatcacttactccctaatagaggacactatccagggggcacccctatctgcctacctctccatcaactccgacactggggtcctgtatgcgctgcgatccttcgactatgagcagttccgggacatgcaactgaaagtgatggcgcgggacagtggggatccgcccctcagcagcaacgtgtctctcagcctattcctgctggaccagaacgacaacgcgcccgagatcctgtaccccgccctccccacagatggttctaccggcgtggagctggcgcccctctccgcagagcccggctacctggtgaccaaggtggtggcggtggacagagactcgggccagaacgcctggctgtcctaccgcctgctcaaggccagcgagccgggactcttctcggtgggtctgcacacgggcgaggtgcgcacggcgcgagccctgctggacagagacgcgctcaagcagagtctcgtggtggccgtccaggaccacggccagcccccgctctccgccactgtcacgctcaccgtggccgtggccgacaggatctccgacatcctggccgacctgggcagcctcgagccctccgccaaacccaacgattcggacctcactctgtacctggtggtggcggcggccgcggtctcctgcgtcttcctggccttcgtcatcgtgctgctggcgcacaggctgcggcgctggcacaagtcacgtctgctacaggcttcgggaggcggcttagcgagcatgcccggttcgcactttgtgggcgtggacggggttcgggctttcctgcagacctattcccacgaggtctccctcactgcggactcgcggaagagccacctgattttcccccagcccaactatgcggacacactcatcagccaggagagctgtgagaaaaagggttttctatcagcaccccagtctttacttgaagacaaaaaggaaccattttctcaggtaaacttttgtgatgaatgtatcagctatctagagaaaaataattcttgatttaacttactagcgttcgctctttgctacagatagttcttctaacccatgtatctttgtagctttttattacaagtcctgcaaaatcacgattgagtctacacgttcatatgcaggtatatttataattgttcttgcactgaaaaggagactgtgatcataatgtaggtggttgggttgaaggtatgtgtgagatgccatctctgtttggaaagagcactgcattagaaacggcgatctagcttctaacattttcttacttgcctctgggctaaaaggtttgattagaaaaggctcaccaatatttaaatgactaacactattttcaaattttctttttataagtacctgctaatctacccctgaatttaatgtagatgtcatctgtcaggacactgtgatagtttatttggggacatttgaagaggtgaagattgtctaaagtagtatttttagttgtgttcatataagattatagagatctatataaactgcaattttaaattattgttgaatattttagccttttattctatctttattatcagatttttttggttttgagatggggtcatgctagagtgcagtggcatgatcatggctcactgcagccactacctcctgggctcaagcgatcctcccacctcagcctctcaaagtgctgatattacaggtgtgagctgtggtgcctgtactgaagaatacgtctatttaagtaatgtatgaagtaacaaaatgaacaacacaaaatttatcatgcaacttgagaaatatctttgaagcctcctgacttatacattatacctgtaatgaaatcagctaacaaaaatcaagtatatatcctattttaatgtgtgttaacttttcagaagaaaaaaaaagtatggtcggggagtaagtccatgctttgatgtatttactctgctccaataaaatacagagatacataaaatataagaggaaagcaaaagcaaagtggtgagctagtctaaagccatgtgagttatagtcttggacttaaaagcagaaattgaaggttaggaaactgcctccagcaatgtaatagggacagaagtgcttcagactagataaatatctggaccaggcttactgcctgaatccaaaataagcaatgaggcccttcagctggttaaaaaggaaaagaaagatgcattaacatgctgcctagctgggcgcagtggctcacgtctgtatttccaacaatttgagaggctgaggcggaaagatccttggagccctggagttcaagaccagccggacagggcggcctgcgactgtagtcccagctacgcggggcggggaggggcggggcggggcggggcaggagctgacgtgggaggatcccttgagcccaggaagtcaaggcttcagcgaaccgtgatcgcgccactgccctccagcctgggcgacagagccacaccctgttaaataaataaatataataataaaagctgtttcccaattccggtggttataactttcttcgtaagctgtgtagaccaagagagagagacagacacggatgctggatagagacagcgaacaccaagtatctcatatgtgagctgtggtatccagaatatcactgctgtgcatcattaaagcgtcattaagagacctagttatggcctgggacctgaggtcagatagaaactatttcaaaaccattacaaatgagcactgaacccaggagggaaggagagagggatatagtgtagaagagaaaaaaacaaactaaaactaaaaacaaacagagctcttccactaaaaataaatatacaaaccaaaatttcaaaacacacttgtctcgtagaatttattgttactagtgagaaactttctgtcaacacactgttattttttaaggtaatctctgttttctctctggtaactattgaagactttctctcattcttgctgtgtgtctgttgcatttttatttttattttttgcttggtaccaagagtatactctcaattgataactaagttatctcacttctggactttctcagctcttataatcataattttttttctgtgtatatacaagtgagctacatttacctattaaaggacaaatattacaaaactggttgatttttaaaatccatattctaataatacacgtgcttaaaataaaaatacactgaaacagtgaaactaaatatatatgtacacacacaaaaaagaaagtcatgttaatgtaacaacaaagtcatatttaaggtaacaaacacaaattgtgattttaaaaaatgaactgattatagttgtaaaaagagcagatgatcaaaaggatataaaaatataagcttctattactgaaaaatatagcttagaaaataccggaatatttaaacataattccataagaaataatagaccccacaggaagaaagttagttaacataaagaagatttgaacaacataatttagaagcttgatctattaggattctaatagatccgttctgcacacaacaaatatggaatagtcatccttgaacaagcagacaatctacaagtttattacctagtcattacaaaaaagggttcagcaaattgcaaagtaccaataatatacttgccttacaacacatacttaatcacaaagcaaacatttaaaaatagaaaagggaaaaagtttggatatttacatctacacccttaaataactcttggatttcaaaaatcacaatgacaatgaaaactactcagaaaaaaaggacttaaatattctttattaaaaattgtgagatgcaactaaaactaattaggagtaagtttatagacaaatgcaataatttttttaaaagcaaacaaaattatttaaaatacatgaatttagcttgccattcaagaagtaagataaaaaacatacaatgagtatatactaaaataaaatgatggaaaaaataacaaagagttacatttttgaaatgcaaccatggaagagttctgaggatgaaataatggaagcagacaataaatgtaataaaaccagtggggagaaaatgaaaattctgtcaagtctaacgttaggactcatgtaagagagccaggcacaatggcacacctataatcccaggtactgagtaggctgaggcagtaggattgcttgagcccaggagtttgaatccagccggggcagtataacaagacccaatctctataaaacaaaaaaacacaaacacaaacacaaaaataaaaataaaaaacaaaagcaaaatataccatagtagctctacaagaaaacatggtgagttggtatcaattatttccaatatatttttcttcagtcttgtaagaggaatggatgaaagtaaaaatgagaaaatttcaataaggaaggagccaaaaggcaaacagattaaagtgtcaccagaaatgggcaattccacttatgccacatacaaaaattaattcaaaatggatcaaagaagcaatattcagaagcaataaaacccttttagttattatgtttaagaactaaaactatacaactcttagaagaaaacaggaggaaaccttcataacattgatttttggcaatgatttcttggatatgacaccaaaagcacaagcaacaaaagaaaaaaattgtatactggactttatcacagttaaaaactatatgcagcaaagaacaatatcaatagagtgaaaaggcagcccacagaaagagagaaaatgtttccaaatcatgtatctgagaatggatatccagaataaagaactcgaactcaacaacaaagaatcccaaacaattggatgttaaaatgagcaaaggacttgaatagacatttctccaaagatgatatacaaatggccaaaaccatatgaaacaatgttcaacatcactagtcattagggaaatgcaaatcaaaaccataatgagatactactccacattcattagaattgctgtcataaaagaaaagaaaagaaatgttaacaagaatatggagaaattggaattcttgtgcattgctggtgaatataaaatgacacaactgctgtggaaaatggtatggtgactcctcaaaaatttaaacatagaattaccatataatccagcaattccactctggttattacccaaaagaagtgaaaatagggacttcaacagatatttgtacacctatgtttatggcatcattagtcacaatagttgaaaagtggaagtaacccaagtgtccattgacagatgaatgggtaaataaaaagtggttcacacatacaatgggctgttatttagccttaaaaaggaagggaattctgttacatgctacaatatggacgaacttcaaagacatgatatcaagtgaaataaacctgttataaaatgacaaatactgtatgattcctcatatatgaagttcctagattagtcaaattcatagagaaaaaaggtagaatggtagttgccagggactgggtgaaaggcaatggggagttgctatttaataagtacagagtttcagttggggaggatgaaaaagttctggaagtggatggtggtaatggtcacaccagaatgtaatttgaatgtacttaatgtcacagaattgtatgcttgactatggtcaaaatggtaaagatgaaacaagagtaagaagacatccactgcattgtattttacacccttggaaaatgaatatcagaaaaagaacttgacaacctcaaacaattttgagtgactgattcctagtgtggtgaaaaaccccttccggctctagctttatcaaatagacctgctttctgtttctgtaatgttccatgctgtctcttaccttcaagcatttgttcagaggttctagaacacttcttcagcctttttcttgattcaatcctactttttatgattcagcttcaatcatgccctcaaaaagacttttctgaccccaaatctagactggatacccctcctaggtattcctccatcacccagtgtttcctacctcatatcacagcagttaccatactctattatactctctttactttcttatgtcctcctccaaccttcacgcttgagaccagggcctgtgtttatcatgttcaccatttctagctccagctgcaatcatgcaaagtgggaggcacatgtacccaattaagtgtctgatgattcaataatttaaaggcagattttgaaggtaaatgcaaagccatcaaccataaacgttcaaaatatataaccttagaagaaaacgtagctaacgtttcttaattgatcttactgcttctgattatacaataagagatggaagatgtttggagcaagggcagtggtggcattgattaatgccttgagcagtcaataatactttcctagcaactattatcaagatcatgttcatttataccattcttattaatcctgataaaaagattcctgttttgaaagatctaattctagggtatcttagagctgtaagattctttaaagcgccttgaaagtcaacaaaggcaaacaaacaagaagtaacttaggttttcctgagcaggtgcagaaattatttaggcctctgagcgtcgctgttgaccacctaaggagtaaaaggcagcgagacatccaatccagcaatacggctcccacagcacaagggggtggaggtttggccctaaagcttcaggacaccaaagaaattcagtcgaacagcccaccagttctctccatagggacctgggtcccgtgaatgctggttatctcacaccctgaggaataaagattggaatccgcactggatgctggaagttgactcggagaaaattgcgacaggagggaaatggcggctctgcaaaagttgccacactgcagaaagctggtcctgctgtgcttccttttggcgaccctgtgggaggccagggccgggcagattcgctattctgtgcgggaagagatcgacagaggctccttcgtaggcaacatcgccaaggacttgggtttggagcccctggcactggcagagcagggagtccgcatcgtctccagaggtaggtcccagctctttgctctgaacccgcgaagcggcagcttggtcactgcgaacaggatagaccgggaggagctctgcgctcagagcgcaccctgtctgttgaattttaacattctgctggaggataaattgactatttattcagtagaggtggaaataacagatattaacgataatgcccctcgctttggagtagaggaactggagctaaaaatcagtgaaaccactacgccaggattccggattcctcttaagaatgcgcatgatgcagacgtaggtgagaacgcccttcagaagtacgcactcaacccaaatgaccacttctccctggacgtgcgaaggggagctgatgggaacaagtacccagaactggtgctggagcgctctctggaccgcgaggaagaggctgttcaccacctcgttctcgtggcttctgatgggggtgacccagtgctatctggcacctcccgcatctgcgtgaaggtcctggatgcgaacgacaatgcgcctgtttttacacagcccgagtaccgcataagcattccggagaatacgctcgtgggcacccggatactcacggtgaccgccactgacgcagatgagggctactacgctcaagtggtatattttctagagaaaagccctggagaaacctcagaggtatttgagcttaagtcaacatctggagaactgacaatcataaaagatctagattatgaggatgctacattccatgaaattgatattgaagctcaggatggtccgggccttctaaccagagcgaaggttatcgtcacggttctggatgtgaatgacaatgccccagaattttacatgacatctgctactagctcagtttctgaagactctcttccaggaaccataattgggctttttaatgtacatgatagagactctgggcagaacgcattcaccacctgttcactccccgaggatcttccttttaagttagaaaagtcagtagacaattactaccgactggttacaaccagagcccttgacagggaacagttttccttttacaacatcactctaaccgctaaagatggagggaacccctccctgtccacggatgctcacattttgctccaggtggcagacatcaacgacaacgcacccgccttctcccgcacatcctactccacctacattcccgaaaacaaccccagaggagcctctgtcttctcagtgacggcccatgaccccgacagcaacgacaatgctcatgtaacttactctttcgcggaggacactgttcagggggcacccttatcctcttacatctctatcaactccgacactggagtactctatgcactgcgctcctttgattatgagcagttgcgagacttgcaagtgtgggtgatagcgcgggacagcgggaaccctccactcagtagcaatgtatcattaagcctgttcgtgctggaccagaacgacaacgcgcccgagatcctgtaccctgccttccccacagacggttccactggcgtggagctggcgccccgctccgcagagcccggctacctggtgaccaaggtggtggcggtggacagagactcgggccagaacgcctggctgtcttaccacctgctcaaggccagcgagccgggactcttctcggtgggtctgcacacgggcgaggtgcgcacggcgcgagccctgctggacagagacgcgctcaagcagagcctcgtggtggccatccaggaccacggccagccccctctctccgccactgtcacgctcaccgtggccgtggccgacaggatccccgacatcctggccgacctgggcagcctcgagccctccgccatacccaacgattcggacctcactctgtacctggtggtggcggtggccgcggtctcctgcgtcttcctggccttcgtcatcgtgttgctggcgcacaggctgcggcgctggcacaagtcacgcctgctgcaggcttcaggaggcagcttgacaggcatgcagagctcgcactttgtgggcgtggacggggttcgggctttcctgcagacctattcccacgaggtctccctcactgcggactcgcggaagagccacctgattttcccccagcccaactatgcggacacgctcatcagccaggagagctgtgagaaaaaggattttttatcagcgcctcaatctctactcgaagaagaaagagaagaaacgttttctcaggtaatctatcttttcacaacatacgtactagctagtttgctgaagtaattcacttacttgtttactatatctattttgttccccatatttccttgagggtagagtcaagttttaggaagtgagtcttggtgaattatttcttggtaggtcttagtgttcacaggctgtaagaggaagaagagacgtgagaatctttgtgcaatgaatgtaaaccaggagttaatagataagattatccaaagagcactgcattaggaactagggtgtctggtttcttatactttcttctccatccctgggcaaatcatctcatccacccagatcaacaattttttctttgttaaaaatataaagattggagtttatgtttactcaagtcctttcttcttttaagttatgactcttactctatatttgaatctgtatatgaacagtgaaacatgttagttggctagttctttctcattcagtcttaatacatttctttcagtttggcagcaaaattgttttccttaacttgcatgcccttccctgttaaaaatatggaaatttagaaatatacattccttacagtgtttcaggaaggtatgtcatattattttggcttagttttaaaaatcacattaacctctaagctatatgcttcttgaagaagtgactgacttatcatctgctctataataaagctgtagagtggtaataaacaggtttctcctttttttttatctttctcatacgtgggaaccatactgtattttaatctttaaaataatatatatcctcaatatagttttgcttaaagaaaagatacaaaagattcatatcatacaattgcccagaaccaacttctttatacatctctcttctcaaggtttctactcacaatagctgctagaaatgttcccaatccctcacccaatcccagtgcccctctgatcaattttcttttcccattcctcttcctatattggcttttagtatgttggttatgtatttaataacagagaataataagcacactaatgttctatgtaactggcatcattttttatttttatttgaaaattatcatgtaccaattgagccttttattgaatgataccatatttctcaaagtgctgtgattctttccgttgcatttgatcaagaaaaaattttctgagacaaggtgttgttttggttactattacataattgtctatgagtaaaattggaactcactgtggaataatatgtcataatagctttacttgtaagtgaataataaagtataaacaggaaaattaaagcaaagttatttttagtgtgtgtagtaactccacaagaataaatgtcttatgcatagatatgtaatgcatcatgattgaaacgacaaatatattgtatttatatttctgtgcttggaaacttatggggaaagagattctggaacataaaagcttatttctactagtttcagttggttttgaaaaaacatccttacagtctagatttaaacaaaggaaacttctttcagtaccctgaaggtctgtgatttctctctcacacctaggcattgtcatgctgttctctcccacatccaggccttttcactgatccactcctctcatgtttcctgggaaagcgtttgctaacattaaaggcccaattgaaggcccccctaacccccttggcttctcccattatggtaattatctcagtacactgcaattccctgtttgcttttatatccttataatctctgtgaaggaagctactgtgtctatattgttcaccttaaatccccaaacatattgtctgatgcctaattatgtgtttgtttaatgaatattaaataacaacaaatatcgaaactaagttatcaggtcaccaagaacaaacttaaagaaatataatgtataaatatggctgatttctgtgtgtttcttttctttttttccttgtctcagctcttagagagttaagagtatagagagggaaaggtcaaagaggaggtggatatcttatcaaataaccctgataaatgtagtaagtataagaataaacacattatcaaggttcagtggtggaagaacaagtggtggtcatgtcttttaatagttgtgttggtccttacggccagttctttgttactgtgtgtttcttaaactgaacaattcaaaaaagttaactccactatgtttgaagcaatattggtggcattaaggttagtgcatggattcccaagaaagataacttgaggtgacactgtttaacatatatcgattcaattatgttcaatcaacactagtcctcttatctctgacaagaaggatttcagatcttggataattcaaaaataataatgtgtctgagaggatgcagtaaacggttaggcctcttagtgtcgctgttgaccactcaagaaggagaacgcagctggagaactagtccaccatttccttgctcctaaaatgcaaagaaccagcaaatcagactcagaagatccggggcggctgccaacctcacctcttagtcaaccagctgtttgacctgtgaattaggcccgtaaaagacttcgtttcttgagaaaataagattggagtccgtcgtaggaaactggaaccgaattcagagaaagcgattcaccgaaaaggaaatgaccaattgcctgagtttccgaaatggcagaggactggccctgctgtgcgcgctcctggggacgctgtgcgaaacaggatccggtcagatccgctactcggtgtctgaggagctagataaaggttccttcgtgggcaacatcgctaacgacctggggctagagccccgggagctggcggagcgcggagtccgcatcgtctccagaggtaggacgcagcttttctctctgaatccgcaaagcggcagcttggtcaccgcggagaggatagaccgggaggagctctgcgctcagatcccgctgtgtctggtaaaaattaacattctggttgaggataaattgaaaatttttgaagtagaaatagaaattaaagatattaatgataatgctcctaatttcccaacagaggaattggaaataaaaattggtgaactaacggttcctggaacccgatttccaattaaaactgcttttgacccagatgtaggcattaactccctgcagaactacaagcttagccccaatgactacttctctctggctgtgaatagcgtctctgagggggccaagtatccagagctggtgctggagcgggccctggaccgtgagaaaaaagaaattcaccagcttgtcctggttgcctctgatggtggcgaccctgtccactctggcaacttgcacatccaagtgatagtcctggatgcaaatgacaacccaccaatgtttactcagcctgagtaccgtgtgagtgtttgggagaacgtgcctgtgggtacccggctgctcacggtgaatgccactgaccctgacgagggattcaatgctcaagtgtcttatattctagataaaatgcctgggaaaatcgctgagattttccatcttaactcagtgagtggagaagtatcaatattaaaaagtctagattatgaggatgccatgttctatgaaattaaaattgaagcacaggatggaccaggtcttctttcaagagccaagattctagtcacggttctggatgtgaatgacaatgctccagaaattacaatcacgtctctcacaagctcagtcccagaagagggcaccgttggaagagaaattgctcttatcgacgtgcatgaccgagattctgggcagaatgggcaggttgaagtttttgtcctgggaaatctgccatttaagttagaaaaatcaatagatcaatattaccgcttagtgacggccacatccctggaccgcgaacaaatatcagaatataacattagtctgagagcctcagatgggggaagcccgccactgtccacagaaactcacatcaccctgcatgtgattgacatcaatgacaacccacccaccttccctcatttatcctactccgcctacattccagaaaacaaccccagaggagcctccatcttctcagtgacagcccaggacccagatagcaacaacaacgcccgcatcacttatgcattgaccgaggacactctccagggggcgcccctgtcctccttcgtctctatcaactccaacactggcgtcctatacgcgctgagatccttcgactacgagcaatttagagacttaaagctactggtgacagccagcgacagcgggaaccctccactcagcagcaacgtgtcgctgaacctgttcgtgctggaccagaacgacaacgcgcccgagatcctgtaccccgccctccccacagacggttccactggcgtggagctggcgcctcgctccgcagagcccggctacctggtgaccaaggtggtggcggtggacagagactcgggccagaacgcctggctgtcctaccgcctgctcaaggccagcgagccgggactcttctcggtgggtctgcacacgggcgaggtgcgcacggcgcgagccctgctggacagagacgcgctcaagcagagcctcgtggtggccgtccaggaccacggccagccccctctctccgccactgtcacgctcaccgtggccgtggccgacaggatccccgacatcctggccgacctgggcagcctcgagccctccgccaaacccaacgattcggacctcactctgtacctggtggtggcggtggccgcggtctcctgcgtcttcctggccttcgtcatcgtgctgctggcgctcaggctgcggcgctggcacaagtcacgcctgctgcaggcttcgggaggcggcttggcgagtacgcccggctcgcactttgtgggcgcggacggggttcgggctttcctgcagacctattcccacgaggtctccctcactgcggactcgcggaagagccacctgattttcccccagcccaactatgcggacacgctcatcagccaggagagctgtgagaaaagcgagcctcttctgataactcaggatttacttgaaatgaaaggagattccaacctacttcaggtgagtttatttatttctttgattattaagaacaaatatgagaatgtggttattataaagctttaacacatatgtatttgagaaataaagccatgaggttgtcattagtcctttgactaaatatttgtccccctttctttctgggcctatagtaggactgcactccccggtctggttatggttgagtgggcttagggaaaaaataatacatcgtgagtgaaagtaaagtgtcacttcctagaggaatctgccactgtgagaattttcagatctctaagttactatttgaaattgtgactgctccttctacctgggtccttgagtaactatgatgagagaaacacaacactggtttgtatacctgtgataaataggcctttttcattttaaatccctgtgctttggagtttgtcattccaacctgtatagcttatcctgatacatacaagtaaaaatacatatgaataaaagatattttatgcccatgaaattaaatgatgtttgactccttccaagacaggtgacactctttttttctttctccttccttccttcctctctctttcctccttccttccttcctctctctctttcctccttccttccttccttcctctctctctttcctccttccttccttcctctctctctttcctccttccttccttcctctgtttctctctttctttctttctttctttctttctttctttctttctttcttgacagggtcttactctgtctggagtgcagtggcatgatcacggctcactgcagccttgacctcgcagactcaagtgatcctcccacctcagcctcccgagtagctgggactacaggcacgagccaccctcccagctaatttgtttttgtttttgtagagatggggcaattgctatgtttcccaggctggtctgaaattcctgagctcaagtgatctgcccacgtcagcctcccaaagtactgcgattagaggcatgagccaccatgcctggcctgttattcttttcatctcaataacataaaaattggagaacaaaaatgtagaggctgggtgcagtggctcatgctgtaatcccagcactttgggaggctgaggcaggtggatcacttgaagtcaggagttcaagaacaccctggccaacatggtgaaagcctgtctctactaaaaatacaaaaattagctgggcatggtggtgggcgcctgtaatccaagctacttgggaagctgaggcagaagaattgcttaaacccaggaggcagaagttgcagagagccaaaattgggccactgcactccagctggggcaatagagagagactccatctcaaaaaaaaaaaaaaagtagaggctggtcaaatggttttacctatagtgcctgttacatatgcctaatgtatatgcttatgtgtgtattcattttgatttcaacattttgcctgagggtggaaagctcacctagctaaattattatgagccttggagtggtatttcttgtccttgagaaggacatcaaaaacatgtaaaggaatatgtctcagcctctgcgggagatttccagacaatctcttccaacaatggaatagaagtcccttcttttgtcatgttctacaactttcttgagccagaaattgttggcttattctgcaatttatgaaattattttcactcatgaaatcatatgagagttatccaaaattagaccaaaatatgttttattagaactcaaacaaaagaatagattcctccctcaatatattaggaaaaggcacatttaaatgtatgagacaacagggccagaacacaaaagctgtaagcagagtaaggtgtattctcactgaaacatggaaatacatcacagaatttaaaaggcccatagccaggggaggacttctgagcctaggactttgagacctacttgggcaacatagcatgaccctgtctcaaaagaaaaaggcacgtaacttttaacatatcatttttagaaaaaaaaatgtttatagtattagtatcactttccctgtaaggagaaaaaaaattaattagctgtgtcaggggaaatttggatgctcaaagataatttctaagaattctatatgaaacatagcctacatatgtgtcatgaaaatacactgagagtatggaacccatacaattccacctacttgtacaggtaatggaaggtctcagacatcccattttcactaaaaaggatttatttttatttttttgaagaatgggcaagaatccactacaacagaaagggaggagaagttcatagtaaaaggaatggaaagtataaaggcatgatgcaaggaaacaagtgaaaaggtatcttaagaaaacagataataggctgtttcgaatagagtatgagtatgggtgagcactgcaaaatagtagaataaattgttgagttggatctcatttggtaatgcatttgaaataaagggatttgctttgaaccaagactggttctaagcctggaactacagaataagttccaaaattgggtgtctaagaactctgaatacctctccaatatttaccagtggtcaagtcaaactcgttttgctcattaatggtataagtcggctggagctgagaattggcattatagagaatgtttttgagacagagtcttgctctgtcacccaggatggacttcagtggcatgatctcaactcactgcaacctctgcctcctgagttaagtgattctgctgcctcaacctcccgagtagctggcgttacaggtacccgccaccatgcctggataatttttattttttttagtagagatggcttgcaccatgttggacaggctagtctcaaactcctgacctcatgtgttcttcccaccttggcctcccaaagtgctgggatcacaggtcactgcacccagcctagagtatttaatatacattcatataaaaaagaagcactggtttcataaaacaaatgtacattatatgagattccacttcataaaagcatgtatgtgtaccccaacactaaattggcccttttaacaaaatatcagactttgtcctacttaactggaaagattatctatattttataaagaagagaaataacataatagtaaggctgtgatttcctcttttttgcaaaaactatttttgaaaagtattactgaattgataacatatatatggagagatttaaaatactagataagggagcttattccaatgaatttacagaaaggtaggtattttagtcaactaaaaatataaataaaaattatcaattcacttatttggatacagcagtcatgccagagtttataaatatagtgaaatcactgaagatttttttttacccccaaaactgaaaaaaatggcagtgtaccttgtgaattttttaaatgaaaaaagaatacgaaatgatgaaggcccttatctgatgatgacaaactagaaaactgaaatgtaaaggggaaaatgtgagtatgtgtttccctccagcaaattaaagacagggtacatagattcaagaggttgcgctttgaggataaaaagctgggccctgtgcagttttccaagacaacctctgggcgccgctgtcgaccaaaaggaagtgaaggcttctcaattctgcaggagcgtcaggcagggtgccttcctgctttgtccggtgcactgagcacagacgctgctcctgttcaccctcgagcgcctaactaataagtcctaagctcaaatcacagaagtccagggtgctgccatttctttttgaaaaacatcccagaggaaagaagctccgcggagagttcctgaaatgcagagagccagagaagccgaaatgatgaaaagtcaggtactgtttcccttcctgctgtctttgttctgcggggccatctcccagcagatccgatacacgattccagaggagctagccaacggctcacgggtggggaaacttgccaaggatctggggctcagtgtccgggagttgccaactcgaaaactgcgggttagtgcagaggattatttcaacgttagtttggagagcggggatttgttagtgaacggtaggatagatcgagagaagatttgcggaaggaaacttgagtgtgcactagaattcgaaacggtcgctgaaaacccaatgaatgttttccacgtggttgttgtaatccaagatattaatgacaatgcaccacgtttcgttgcaaaaggcattgacttagaaatttgtgagtcagccttacccggggtaaaattctctctggattctgctcaagatgcagatgtggaaggcaattcactgaagttatacaccatcaaccccaatcaatacttctctctgtcaacgaaggaaagtcctgatggaagtaaatatccggtattactgctggaaaaacctctagacagggaacatcagagctctcatcgcttaatcctgactgccatggatggcggggacccgcctctaagcggcaccacccatatctggatccgagttacggatgccaatgataatgctcccgtgtttagccaggaggtatacagggttagcctccaagaaaacgtaccgtggggaacctccgtgctgcgggtgatggccacagaccaggatgagggcattaatgcagagatcacctatgccttcctcaattccccaataagtaccagcctcttcaatctcaatccaaatactggcgacatcacaaccaatggcacattggattttgaagagacaagtagatatgtgttgagtgtggaagctaaggatggaggagtacacacagctcactgtaatgttcaaatagaaattgttgacgagaatgacaatgccccagaggtgacattcatgtccttctctaaccagattccagaggattcagaccttggaactgtaatagccctcataaaagtgcgagacaaggattctgggcaaaatggcatggtgacatgctatactcaggaagaagttcctttcaaattagaatccacctcgaagaattattacaagctggtgattgctggagccctaaaccgggagcagacagcagactacaacgtcacaatcatagccaccgacaagggcaaaccagccctttcctccaggacaagcatcaccctgcacatctccgacatcaacgacaatgcacctgttttccatcaggcctcctatgtggtccacgtgtctgagaacaacccacctggcgcctccattgcacaagtaagcgcctccgacccggatttgggacccaacggcagagtctcctactctattctggccagtgacctggagccgcgggagctgttgtcctacgtgtccgtgagcccgcagagcggggtggtgttcgcgcagcgcgccttcgaccacgagcagctgcgcgccttcgagctcacactgcaggccagggaccagggctcccccgcgctcagcgccaacgtgagcctgcgcgtgttggtgggcgacctcaatgacaatgcgccacgggtgctgtaccccgcgctggggcctgatggctccgccctcttcgatatggtgccacgcgccgcagagcccggctacctggtgaccaaggtggtggcggtggacgcagactcaggacacaacgcttggctgtcctaccacgtgctgcaggccagcgagcccgggctcttcagcctggggttgcgcacgggtgaggtgcgcacagcgcgtgccttgggcgacagggacgcggcccgccagcgcctgctggtcgctgtgcgtgatggaggacagccgccactctccgccaccgccacgctgcacctaatcttcgcggatagcctgcaagaggtattgccagacctcagcgaccgccctgagccctctgacccccagacggaactgcagttttacctggttgtggccttggccttgatctcagtgctctttctcctcgcggtgattctagcgatcgccctgcgcctgcgacgttcctccagcctcgacactgagggctgctttcaaaccggtctctgctccaagtctgggcccggggttcctcccaaccacagcgaggggactttgccctattcctacaatctatgtattgcctctcattctgcaaagacagagtttaattctctcaacctgacaccggaaatggctccccctcaggatctgctgtgtgatgatccttctatggttgtatgtgccagtaatgaagatcacaaaatcgcttatgacccttctttgtcttcgcacgtgagtttctgcaaatctagttaaattttatatatggcggccgggcgcggtggctcaagcctgtaatcccagcacttaaccaggctgaggcaggtggatcacttgaggtcaggagtttgagaccagcatagccaagatggtaaaacccggtctactaaaattacaaaaattagttgggtgtggtggcacgcgcctgtagtcccagttactcaggaagctgagacaggaggatcgcttgagcccgggaggtggagattgtagtgagccaagagtgtgccactgcactccagcctgggtgatgggagggaaactgtctaaaaaaacaaacaaacaaaaattatatattgcattttcttctcattggtgtataagtaattttgattttctttcattgttctagtgatggtatctactgcgggagggggtactagatagatggagattgctttcttgattgctcagtagtcttggcaatttaattttcaatctttactgttggcatttctgtatggttggcaaatcttgctaaagagacctgtttcctagatgttaacacttagtaatagcagtgccttttcttagttgatatgcaatactatattttcaagtcattttattcttagctctttataaatgtatttagagttcttcccacccaagttaaagttcatcaattacattaattatgtaattgatgtaattatgtattaatgtaattatgtaattaatgtaatcttcatcaattacattctagtttgtctttttgcagcaacatgtatgtttaatacagccttccaattattaagactcttaacactttgtctcatcacaagtagcaaatattgtccaattttatatttgcatcactaactttgagtcaatattattcccactctataatttcagtcaatgatatttcataattttcttaaccattcctaaattatttgtttttatgctctttctattttgtctctattaaaacaaagaatgtaatgaacatttgggtttataaagcgttttccatacttcttgtttctttagtgtagatttctgaggaattagttaaatctataaacatgttgagatttttttaatgcatactgtcaaatttatttccaaacatcttatttcacctctcaatcatccgcagtttgtgcggtctttgaggattgtgaaaaacacgtttaatctactctctcaaagtctgagggtttttaaattctgtatagctaatgcccttttgtatgagtcatttctactgctaattgttaagtgaggaataagcttaagaactgatgtactgctttatctcaaattttcacagattagtaaattactgtaagtattcataagaaagaaagcgatggcacatgcaatgataatccatgttcggctaccaaaacatttccttttactggctatttctaaaatgagagctaaagtaaagttagaaattgtaaaataatactgaatgtgtcatgtgaaaaaatcactaaactattatctgcactttatagttattcagtctaacttttctttttatttcttttttatttttaagatcagagttatttacccattgttttaggctttgcatttgaactggtcattcatgaaacattgaaaggtttcataaaaattactactctatgaaaggtattgttctaaagattgagaacacattgtgaacaagatagtcatatgcatagcttgtggccaagaatctactgtacacaaaattaaggagcaaattctcttcccaaacctattatcctatttgtcaatctcatttgtacagggtaaggctaactcttgaacagtaggtgagttttttgcaagggaattgaagcattgccccaggttctagagggtcaactcctgtgaggaaacttgttactgcataaattgggactaaagccagacctccaagttcctgtcccactgtcttttcacttatctgtctcatccatttttcaagtccacctttgtctttaggagagataattatgtccctcacacaatacgctatactgagaatgggctgtggggatgaacaatgtgaaaactgaaaagaggaagaacacatcttaggaaaaaaatcgtcatattttctctaagaaaataaataacttcataaagtttattgtacaggaagacttggatcattcttgaattttcattgcaaatcaaaaacaggaatttgactttattatcttgggagaaataggaatagaaaagtgtataaaaaataaactttttttaaccaagaataaattgcagtaacaggttaagactctgggtgtcgctgttcaccaatcagggggaaaagacaaaccagaaatttaatcagaatcacaagatttctgcagcacaaagcactggctctggagctttatgaaagcttcaagcggaagccctgagagctctggctgtgaatgcactttattttggacccagaagatcctggggctcctcaggcctcgacagagggaaaaccgaagcacaggcgactccgcggcggggttgtaatggcggcgcctcctgctcgcccagaccacacccggctgctccagatctgccttctcctgggggttctggtggaaatcagggccgaacagattctctactcggtgtttgaggagcaggaagaaggctcagtggtgggcaacatcgccaaggacctggggttggcgccccgggagctggcggagcgcggagtccgcatcgtctccagaggtaggacgcagcttttcgccctgaacccgcgcagcggcaccttggtcaccgcgggtaggatagacagggaggagctctgcgacagatctccaaactgtgtgacaaacctggagattcttctagaagatacagtgaagattttgcgggtagaggtggaaataatcgatgttaatgataacccacccagttttgggacagaacagagggaaataaaagttgctgaaaatgaaaatcctggggcaagatttcctcttcctgaagcttttgatccggatgtaggtgtaaactccctgcagggttaccagctcaactcaaacggttacttttccctggacgtgcaaagtggggccgatgggattaagtacccagagctggtgctggaacgcgctctagatcgcgaggaagaggcggttcaccacctcgttctcacggccttcgatggaggtgacccggttcgctctggcactgccaggattctcataatacttgtggataccaacgataatgctcccgtgttcactcagcccgagtaccacgtaagtgttcgtgagaacgttcctgtaggcactcggctactcaccgtaaaagccactgatccagatgaaggagccaatggagacgtgacgtattctttccggaaagtaagagacaaaatatcacagctatttcagttgaattctctgagtggggatataacaatattggggggtctagattatgaggactctggattctatgacatagatgtagaagcccatgatgggcctggtctccgagctagaagcaaggtactggtgacagttctggatgaaaatgacaacgcaccagaagtcacagttacatctctcaccagctcagtccaggaatcttcttccccgggtacagtaattgcacttttcaacgtgcatgacagtgactcaggaggaaatggcctagtcacatgttctattccagataatctgccattcacacttgaaaagacctatggaaattattatcggttgttgacacacagaacactggacagggaagaagtctcagaatataacatcactgtaactgccactgaccagggaactcctccactgtctacagaaactcatatttcactgcaagtgatggacatcaatgacaacccacccactttccctcatgcttcctactctgcttacattcctgaaaacaaccccagaggagcctccatcttatctatgactgctcaagaccctgacagtggtgacaatgcccgaatcacttactccctggccgaagacaccttccagggtgcacctctgtcctcctatgtctccatcaactccaatacagggatcctatatgctctttgctccttcgactatgagcagtttagagacctgcagctgctgatgacagccagtgacagtggagaccctccactcagcagcaatgtgtcactgagcctctttgtgctggaccagaacgacaatgtccctgagatcctgtaccccaccttccctactgatggctccactggtgtggagctggcaccccgctccgcagattccggctacctggtgaccaaagtggtggcagtggacagagactcaggtcagaatgcctggctgtcctacagcctactcaagtccagcgagccgggactatttgcagtggggctgcacacaggcgaggtgcgcaccgcacgggccctgctggacagagacgcgctcaagcagaggcttgtagtggtcgtccaggaccatggccagccccctctctcggccaccgtcacactcactgtggctgtggccgacagcatcccagatgtcctggctgacttgggcagcctcaagccttcagcagacccagacgactcgggcctcacactctatctcgtggtggcagtggccgctgtctcctgcgtcttcctggcttttgtcacggtgctgctagcactcaagctgagacgctggcacaagtcacgcctgcttcacgctgaaggcagcaggttggcaggtgtgcctgcctcgcactttgtgggcgtggacggggttcgggctttcctgcagacctattcccacgaggtctccctcaccgcggactcgcggaagagtcacctgatcttctcccaacccagctatgcagacacgctcatcagccgggagagttgtgagaaaagcgagcctcttctgataactcaggatttacttgaaacaaaaggagaccctaatcttcaggtgagtcaatcttataatagatcataccacactgaaatatagacaaagagttgtgtaaatgtctctcattttatatgtaatatatcaaataaagttgcctcttttaatattttattgctttaaagaaaactggtggatgaccttccaataatgatcaacagtatttaccacacaaaaatgttgtttattacttatcctttttggtcttcattcagttgtagtttcagccagaattttctaattttacaactctgagccacctcatttccttaaatttccttttctgtgctgggtgtggtggctcacacctgtaatcctaacactttgggagtgtgaggaggacggattgcctgagctcaggagttcgagaccagtctgggcaacatggtgaaacccagtctctactaaaatacaaaaagttagctaggcgtggtggtgtgtgcccgtagtcccagctaccctggaggctgaggcatgagaattgcttgaacctgggaggcagaggttgcaatgagctgagatcatgacactgtactccagcctgggcaacagagcaagcctctgtctccaaaaagtaaaataaaataaagtaaaataaagaataaatttccttttctcttaggtgttcctgaaaagatacaagagacctgtaaaatagaaggcaattgtgtaaattcacatttacaatattctttctcatgaagctattgttggatctggactgagggttttttaatttcctattttcacactctaccatgctttgcttgaagtttacttttccttccttgaaagggtattttccattataacaggcaacgtcaatttaagaatactggcaatttgtgagtttaacttttagatataactttaacaggatattttctcaatgaactggtatatttcaaatattttcttgttgctgttctgagatgcaccagaagtgactatgtgtgattcctctggtgcactcctgtgattatgagaaatatttccaagctaatttcagtcatatataagtagattctaggagtaactttaataatttttaaattgcttatcatgacatcactattgagactttcttgatttccaaggaaaatataagtttttggagtcttttctcttgtcatcatgtgagcctctttcaaaggttgagttacttgggttctggactgatatgatttacgctgcttagtaaggtggcctcatccctattgctacaaattgctttcagatatttctgtcatcatgtggctctgggattattttatatgagggaaaatattttgtgtgtaggggatatacaacacttttgttctttgtgctttcatttaggttctgtgagaattcaaaattcatgaatgcatatgcttacacaaattagtgtaatttgataactggaagttgtagtgatagactgtggaatatgcctcaatttgacttacaaaggagagttttagtttctacatggttttgtattcatagaaagttgtggtgcaatacatagagtaagctggaatatgatatgatgcagttacctggcttggggagcagaaagcagaaataacaagtgaatgttgagagacaacttacatctgaggagagattgtttaaagtaattaagccataaaatataatttggaaatgctcaattggtctgaaactgtgtcaagcatattcaggtgttggcattaggaatatattccagaatgagagtgccacatgttttaaaggcctaggaaagcagtagataatttataacctaaaatcaaattttttaaaaaatgtgtttttgttagaatgggcagtgggtttcttttagcaaataacaattttgattaaacaaattgttgtatattcatattacggactactagataactatattatgggccactagataactataagaaataaataggaaagctctctatgtactgatatgatctttaagatataacaactaaaaaagcaatgtgcagaatatggtatgttgtatgcttacatttgtgtaaagaaggagacagaatatttataaaaatccgttgccctatacaagacatatctccggaaggatacctaagaaactttaacactcatttcccctgtgaaagcatttctcctcatctaaagcagagatgaaaggaagaacctatgctgaatgcatcttttgaatttggaactatatgaatatttcacatattttaaaacaaatgaagactttataaattaaaaaagaaaagaaaagaaaaaagttcttagcaaatattgacaagccattagtgcagtttcctgagaaaacctctgagcgtcgctgttggtcaaaagaacgaagagaagcgtttgggagcctcttagaggggaacttcctgcacaaaccaaccacacagagaaggccagtatagattcggaaacagaaaacaaaagcaggaaaagtgaccttagcccggattctgccatccccggaaggcttattcctcctatgggcaaaggagcaaagggagccagaagatgaaagcgagctcagggaggtgcgggctggtgcggtggctgcaggtactgttgcccttcctgttgtctttgttccccggggctctcccagtccagatccgctattcaattccagaggagctggccaaaaactcggtcgtaggaaacctcgccaaggatctggggctcagcgtccgggacttgccagcccggaagctgcgggttagcgcggagaaggaatatttcacagtaaacccagaaagcggagacttacttgtgagtgacagaatagaccgagaacagatatgcgggaagcagcctctgtgtgttctggatttcgatactgtcgctgaaaatccactaaatattttctacatagcagtaattgtgcaggatataaatgataataccccgctattcaaacagactaagattaatttaaaaattggcgaatccactaagccaggtacaacatttccacttgacccagccctggattcagatgttggtcctaactcactacaaagataccaccttaatgacaacgagtactttgatctcgctgagaaacagactccagatggtcgtaaatatcctgagttgattctaaaacactctctggacagagaagagcacagtttacatcaattggtcctcacagctgtggatggcggagacccacctcaaagtggcacgacccaaatccgaatcaaagtcacggatgccaacgataaccctccagtgttcagccaggacgtgtacagggtcaccctgagggaggacgtgccgccgggcttctttgtgcttcaagtgacagccaccgaccgggatgaaggcataaacgcagagatcacctactcctttcataatgtggacgaacaagtgaaacactttttcaacttaaatgaaaaaacaggagaaatcacgacaaaggatgatttggattttgagattgcaagtagttacactctgagtatcgaagcaaaagatcctggagatctagcagcccactgcagtatccaagttgaaattcttgatgacaacgattgtgcacctgaagttattgtgacttcagtatctactcccctaccggaggattcgccaccaggaacagtgatcgccttgataaaaacgagagacagagactctggagaaaatggagaagtttactgccaagtgttgggaaatgccaagtttattttgaaatcttcctcaaagaactattacaaactagtgacagacggcgctctggaccgggaggagatcccagaatacaatctcaccatcacagccaccgacgggggcaagccgcccctctcctccagcataattgtcaccctgcacatctccgacgtcaacgataatgccccagttttccaacagacttcctacatggttcacgtggcagagaacaatcctcctggcgcctctatcgctcaaatcagtgcctctgaccctgacttgggccccagtggccaagtttcctactccatcgtagcgagcgacctgaagccgcgggagattttatcctacgtgtccgtgagcgcgcagagcggggtggtgttcgcgcagcgcgccttcgatcatgagcagctgcgcgccttcgagctcacactgcaggcccgcgaccagggctcgcccgcgctcagcgccaacgtgagcctgcgcgtgttagtgggcgacctcaatgacaatgcgccacgggtgctgtaccccgcgctggggcctgatggctccgccctcttcgatatggtgccacgcgccgcagagcccggctacctggtgaccaaggtggtggcggtggacgcagactcaggacacaacgcttggctgtcctaccacgtgctgcaggccagcgagcccgggctcttcagcctggggttgcgcacgggtgaggtgcgcacagcgcgtgccttgggcgacagggacgcggcccgccagcgcctgctggtcgctgtgcgtgatggaggacagccgccactctccgctacggccacgctgcacctaatcttcgcggatagcctgcaagaggtattgccagacctcagcgaccgccgggagccctctgacccccaggcaaaactgcagttttacctggttgtggccttggccttgatctcagtgctcttcttcctcgcggtgattctggcaatctccctgcgcctgcgactctcttccaggtcagatgcttgggactgttttcagcctggtctcagctccaagcctggacctggggttctccccaattacagtgagggtacattgccctattcctacaacctgtgtgttgcctcacaatcagccaagacagagttcaattttctgaacataaccccggaattggttcccgcgcaagatctcgtctgtgacaatgcctcttgggaacaaaatacaaatcatggagccgctggggtcccttttgcctcagatactattttgaaggtgagctttaattaatttattttcacttctggttttattgtttcacctaatttgggtaggaagttccactgcgtatttctttgtctgtgagttagatttggccaatgttgtgccttaattgtcttaatcttatctaactgaattttaagtgttttctctctgaagtgtgagatttatttacccatgattgcaaacctttatcacatgagatattgcactgtatttctttttcttcctcatctttacattacttctctctgcagatttgttgctattgagactttaggcaattagtttcaccttcaggctctttgttattcaaattttagttttacttcctcttagaatcataatacttcagagtaaagagagtcttcattttagtaggctttggaaattgggaaacaaagaagaaagacttttgcataatggcatggcttgttaatcacagggcatgggtaggacattgtcccattgacttgaagaccaacactcagtaagctaaatgtcttggaatcacaaatgtatttctaaaggacaggcaatgtttgaggtctgaggtgtctgctagaaagagtgcatttaacaaatgtgagaaatcattctctaacatgcattttaacaaattgctcttaagaaaaactacacattgagaaaaatcttacaacctatgttcacatcattttctacaaaatattacttaaaactttgcttttgaatttcctaattatatagaatttttattttcttagttttctatgaaagtgttattaaataaaatgactttctgaaatgtccatttttttcaatcaagaggtttttctatttctgttgtcatataaagatgatagcagtaaatatctgtctcaacatagaaaggtcactcagtacttctcgacaagtatctgctcatgctttcctgcatggatgatgaaataaaaccccatcctccacagttactatactggttgtcactggaactacaaatatttgaacatggtaatagaaaaacataaaaatgcatagttaacccaactcaaacgctgtctgagatagtggagagactttctcaaagtcctcacaagtaacaaagatctttatttcttctgcatatgacagctaatataacttacataaatcagtaggcctgtttggaaaggtgcatggagaactgggtttgtttccttggtattcttatatgcaaataagcacgttttcctaaatttatcctaataaggagatgaaatcttgaatcctacaaaggtaagaatttgaatgtcctaatttaatggactaaatatagataagaggtaaataaaggacataggctcccccgatgacgcattaaataaaatttttgtaaggtattgagatctaataatcatattgatctcagggattgtggaagtcttgctattcagaattaaagctgaattaacggtcataaacaacgctacacagttaaacattaaggatatggcaacattattagaaataaaattataactaaacttaggagaaataaaaatggaatttgatgcagtcactggttaggactctgagtgtcgctgttgaccaaagtgggaaagaagctgccgcagaggcgacccgactctgctccctccatactaaacacacagaccagacaagctcctacgaaaagccaacgctccacgcccattttcgtcagggaatatgtacccatcggctttagataaataaggaaacagcaggctgaaccagaactaagagaaaattgggcagagagaaggcaatggcgagtccacctaggggctggggctgcggagagctgctgctgcccttcatgctcctggggacgctgtgcgagccaggatccgggcagatccgctactcgatgccggaggagctggacaaaggctccttcgtcggcaacatagccaaggaccttgggctggagccccaggagctggcggagcgcggagtccgcatcgtctccagaggtaggacgcagctttttgccctgaacccgcgaagcggcagcttggtcaccgcgggcaggatagaccgggaggagctctgcgctcagagcccactgtgtgtggtgaactttaacatcttggttgagaacaaaatgaaaatttatggagtagaagtagaaataatcgatattaatgataacttcccgcgtttccgggatgaagagttaaaagtaaaagttaatgaaaatgcggctgcagggacacggttagtgcttcccttcgcgcgggatgcggatgtgggtgtgaactctctccggagttaccagctcagctccaatctgcacttctctctggatgtggtaagcggaactgatggacaaaagtatccggagctggtgttggaacagcccctagaccgcgagaaagagactgttcacgacctcctcctcacagctttagatggcggagacccggtactctccggcaccacgcacatccgtgttacggtcctcgacgcaaacgacaatgcgcccctgttcaccccatccgagtacagcgtgagtgttccagagaacatacctgtgggcactcggctgctcatgctaaccgccacggatccagatgagggaataaacgggaaattgacctactcttttcgcaatgaagaagaaaaaatttcggagactttccaacttgattccaacctgggggaaatctcaactctacaatcactggactatgaagaatccagattctacctcatggaagtggtagctcaggatggaggcgctcttgttgccagcgctaaggtggtggtcacagtacaggacgtgaatgacaatgcccccgaagtgatcctcacctctctgaccagttcgatctctgaagactgtcttcccggaactgtaatcgcgctgtttagcgtacatgatggtgattctggagaaaatggtgagattgcatgctctattcctaggaatttgccttttaaattggagaagtcagttgataattactatcacctattaacaactagggacctggacagagaagagacttcagattataatatcactttaaccgtcatggaccatggaaccccgcccctctctacagaaagccacatccccttgaaagtagcagacgttaatgacaacccacccaatttccctcaagcctcctactccacctctgtcacagaaaacaatcccagaggtgtctctatcttctctgtgacagcccatgaccccgacagcggcgacaacgctcgagtcacctactccctggctgaagacacatttcagggggcgcccttgtcctcctatgtatccattaactctgacaccggtgtcctgtatgctctgagatccttcgactatgagcagttgagagacctacagttgtgggtgacagccagcgacagtgggaaccctccacttagcagcaacgtgtcgctgagcctgtttgtgctggaccagaacgacaatacgcctgagatcctgtaccccgccctccccacagacggttccacgggcgtggagctggcgcctcgctccgcagaacctggctacctggtgaccaaggtggtagcggtggacaaagattcaggccagaacgcctggctgtcctaccgcctgcttaaggccagcgagccaggactctttgcggttgggctgcacacgggcgaggtgcgcacagcgcgagccctgctggacagagacgcgctcaagcagagcctcgtggtggccgtcgaagaccatggccagccccctctgtcagccaccttcacggtcaccgttgccgtggccgacaggatccctgacatcctggctgacctaggcagtatcaagacccccattgaccctgaggatctggacctcacactctatcttgtggtggcagtggctgcagtctcctgcgtcttcctggccttcgtcatcgtgctgctggtgctcagactgaggcgctggcacaagtcacgcctgcttcaggctgaaggcagcaggttggcgggtgtgcccgcctcgcactttgtgggcgtggatggggttcgggctttcctgcagacctattcccacgaggtctccctcaccgcggactcgaggaagagtcacctgatctttccccagcccaactacgcagacacgctccttagtgaagagagctgtgagaaaagcgagcctcttctgatgtctgataaggtagatgcaaacaaagaagaacggcgagttcaggttagttttctctttcggtaaggatgaccagaacattttcatttgtttcctttttcatgtttctgtcatattcagaatcagctagttatgtaaatagtggaacattatttgctgtattggagattaattttttttatataattcatgctttctccatttgttttcaaattctgttttgggaagtctagctgatatctgtagacttaagtgaaacaaataccttaaaggaaagtggttaaatataatcattttacccaaatattttgttatattggaactgcagttctattaatagaaaagatgttttatttattcaaattgttagatatattgttctcttttgagtgtctgcctagacaccattagtgaatgtgttttggaaaggataatgtataggactgatattttagtctacctgaaatttgtttaaggaaataatttacagtatttacataaatcagtggaaaggtacagagaacttctgggtcataaatatcagaaaagaggccgggtgcggtggctgacgcctgtaatcccagcactttgggaggctgaggtgggcggatcacgaggtcaggagatcgagaccatcctggctaacacggtgaaaccctgttctactaaaaatacaaaaaattagccgggcgtggtggcaggcgcctgtagtcccagctactcggaaggctgaggcaggagaatggggtgaacccgggaggaggagcttgcagtaagccgagatcgcgccactgcactccagcctgggagacagaacgagactccgtctcaaaataaataaataaataaataaataaataaataaatatcagaaaagtagataaaatttatattaatgataacatgtagcattctaaagtctggaaagtttgtgttaagccatgtagttattggatatgtgggcttgttgagagaagaaatcagtgtaaaggaaccttaaggttgggcttcgttctgtgatgtaaagcctccagagagttacatactgctgcactcaataaatgtaaatatgtcacacacctggcatcttctgttatagataaaccctttacttattagaatcaatacctactgcaatgttagcgtttctttaagtgtaggtgcaattcttctttattacttgagtttaaggttgtatttgaaaaaaaaagaactcaacttaaagatggttcaaaattttaaatttcatatctaacgtatgtgctcatcttaaattaatagatttgtcttaatgaaatactggcctatgtgcctcaaattccaggaggatgtgttatgtaatgaaagaactactatatttcccttctgcatctgatttgctgaagatgattttcagatgtttcttattaaaatattcttaatccttcaaattttgtacttttaaaaccttgagcatcagcttcaaataatgactaaataaggggaaaaggtaataaaatattacaaatgggatagtaagctacattactcaaccacatgaaaggttaattgacacattaaagaacctaagaccacttgatttttattttttaaacactgttaaagagcattcaagtatatctatatctatatacatatacacacacatatatatacacacatatatatacacacatacacacacacaaacacacatacatacacacatggacattctgaccaaaatgtaaaatgtacaaactcaccgaatagtgaatgcatccaaagagtaacaagagaatctatacagtaggtgtcgacattattcactcctatgtgaaaacttgcttttccattttttttaaaagaaaatgttatatgcttcttagggtaaggtgtttgggaaaaaagtaaaggttatagatttgggtacatttcttctgagttaaatgttttgtgcaatggaaaaatatctttaaaccctctataaactactaacagactataaaatgcttgatccatacattttgaatgtatgtactgtatataccatatacttttaaatatctgaatctttagttttatatgtgttctgaagaataatttttcatactaattgaagtgttcatacaatgaacacttggcattgtgttggaaggcacttgctttggaatgttttggagcaaagtcttgagtcagttatatttttgatgtttgtataaaggtgacaatgagtgtctgtctagaattctggttactgtgagtagtttaagatgctataatgcttttccactataaggtgaattcggtgtggaactcattgcttattgctgcacacttgcctagttttagagtaacaatacattatgtaggctaaagataatttctttaggaagattttctggtttgaaaatggaattaaaactgtaagacacctgtcagaaacatggaaaatggcatgttattgaccagggaaaagtgtaaataacaaaaagttaggattatcagatggtaaactggggaccaaggaaaagtggacaggaagattacttatataattaaataatataattataaggacttacaattcactccccaatcctaataacgcatcattgttaggctacttgagaagaaacagtacatttcaggacaattgtgatgtagtatgaaaaaacatcctttgtaaaagtttttcatttgggccagggtggttcatgactataatcccagcaatttgggacgctgaggtgggaggattgcttaaagccaggtgttctagcccagcctgggcaacatagtgaaaccccacctctatagaaaaaaaaagttttcaatcatacttatttaattaaaagtagacacttggaaacaaaggaaaagagaccctcttgctttttactatacttctattttataaggtcaatcatttcctcattacctttaacttcttttggggggagataataaagataaaagagaagaaagtgaaacatagaataaaactaaaagctatgacattataacttttagaagttagaagtaaaggaaatagaatgcaataagaatacacgtgaagctgatatttcaagcctctttatactacgtcttctgccatcaccaaaaatagcttccatttgtatgattttctatgtattattttatttggccctcatttctactagagtaagcagagaagatattattatgaccattttatgaaaatggaaactaaaaacgtgacgggattgagcaagattatctctgccctttgacaagtaaaaggtacttgatttggatggataaagctcaaattaaaagaaataacagactaaagatatagtaagtatatttaatgttttttaaaagtccttttaaaatgggaagaaagtatcactatcagtacactgccgatttttctcctaactagctccttatttggagctgatttagtcaccattactgcagttctgcagcagaggcgccgggtgccgctcttggctagtgctgtgcaaaatattggctcctcccgctgcagccagctcggaagaaaagtgcactctctatcaggcttcctgcagcggagacacccattagagaacccaagcacaaagacaaagcaaatagttggtcctgctcggagaactcttgggattatttaaagatctcctctcctcggatttagaaaggcaaaggcgcagagagcgggatgggaaatagctccggatggaggggcccagcagggcagaggcgaatgctatttctcttcctgctctctttgttagaccaggttctctccgaaccgatccgctacgctattcccgaggagctggacaggggctcgctggtagggaacctcgccaaggacctggggtttggcgtgggggatttacctactaggaacctgcgggttattgcagagaagaaattctttaccgtgagccccgaaaatgggaacttacttgtgagcgaccgtatagaccgagaggagatttgtggcaagaagtcgacgtgtgttctggaatttgaaatggttgctgaaaagcctttaaacttttttcatgtaactgtgctgatccaggatattaacgacaacccaccgacctttagccaaaatatcactgagctggaaatcagcgaactggctctcactggagccacatttgccctggaatctgcgcaagatcctgatgtaggtgtcaattcgctgcagcagtactacctcagccctgatccgcacttctctttgattcagaaggagaacctggatggcagtaggtacccagagctagtactgaaagcacccctggacagggaagagcagccacatcaccacctggtcctcacagctgtggatgggggcgagccctccagaagctgtaccacccagatcagggtaattgtcgcagatgcaaatgataaccccccagtatttactcaggacatgtacagggtcaatgttgcagagaacctgcccgctggctcctccgtattaaaagtgatggccattgacatggatgagggcatcaatgccgaaatcatctatgccttcatcaatattggcaaggaagtgagacaactgttcaagctggacagtaaaacgggggaactcaccactattggagaactggactttgaagagagagatagctacacaattggggtggaagcaaaggatggtggacatcacactgcatattgtaaagtacagatagatatttcagatgaaaatgacaatgccccggagataaccctggcttctgaatcccaacatatacaagaagatgctgagctggggactgccgttgccctgatcaaaacacatgatctagattctggatttaatggagaaatcctatgccaactaaaaggaaacttcccctttaaaatcgttcaagataccaaaaacacatacaggttggtgacagatggagccctggaccgggagcagatcccagaatacaatgtgacgatcacagctaccgacaaaggcaatccaccgctctcctccagcaagaccatcactctgcacatccttgatgtcaacgacaacgttcccgttttccaccaggcctcctacaccgtgcatgtagctgagaacaatccgcctggagcctccattgcgcatgtcagagcctcggatcccgacttgggacctaatggccttgtctcctactacatcgtggccagtgacctggagccgcgggagctgtcgtcctacgtgtccgtgagcgcgcggagcggggtggtgttcgcgcagcgagccttcgaccacgagcagctgcgtgccttcgagctcactctgcaggcccgcgaccagggctcgcctacgctcagcgccaacgtgagcctgcgcgtgttggtggacgaccgcaacgacaatgcaccgctggtgctgtacccagctctggggcccgaaggctctgcgctcttcgatatggtgccgcgctctgcagagcctggctacctggtgaccaaggtggtggcggtggacgcagactcgggatacaacgcctggctgtcctaccacattgtgcaggccagcgagcccgggctgttcagcctgggcctgcgcacgggtgaggtgcgcacggcgcgtaccttgggcgacagggaggccgcccgccagcgcctgctggtcactgtgcgtgatggaggacagcagcctctttcagccaccgtcatgctgcacctaatcttcgcagatagcttgcaagagatacaacctgaccttagcgaccgccccactccctctgaccctcaggcggagctacagtttcacctagtagtggcgttggccttgatctcagtgctcttcctcctcgcggtgattctggcaatctccctgcgcctgcgatgctcctccagacccgccactgagggctactttcagcctggtgtctgcttcaagactgtacctggagttctccccacctacagcgaaaggactttgccttattcctacaatccgtgtgctgcctcacattcctcaaacaccgagtttaaatttctcaatataaaggctgaaaatgctgcaccacaagatcttctatgtgatgaagcctcttggtttgaaagtaatgacaatccagaaatgccttctaattcaggcaatttgcaaaaggtgagtttcttcaaacctttccttccataaatataattgggtttcaattcattgatttagagataaaaagaatacagattaaatattccctgattacattattttattgattttctggtgtagagtagggtgtctaggaaattctttgtagaatttcctgtagaatatctgtgttgcagttgttctttcatagaaagcctccttttgatagtcttgaaacttttcttaatcctaatacactataatctgaaacatttttaatacagtattatctcacactgtcattttcagacatatctatccagaattagacccaaatcctcacaattaagtggtttacttagttttaatgcagtcaatcctaaaatatatgaaacattatgtatatcttaacacatttttaatgtaacctgtatataatatttttacttccctttgcatgtttttaaaagtatacacagatgttgcctatgtcagggcagtttttaacttctatgctaatcaaaagaaataatggcatctaaaatggcaactcttgtaatgggcactgtaatgaattggttcaaaatgtgtttgtgtagcatatgcctgtagtcccagctactcgggaggctgaggtgggaggatcccttgatcccaggaggtagcagctgcaatgagctataattgtgcccctgcactctagcctgggagacagagcgagactttgtctccaaaaaagtgtttgtggttgttggtacccttactgaaaatgggactagcataaatggtggtgaaatgtgatgataattcaaaatttacagaagattgtaatattatttctgttccccaaggtcctaagagatattttcataaaaatgaatggtaaacttcagagaacatttaaaattattcaaaataatctcttacactcttctaaatgcttcattatcttggggagggaaatattatgagtgtcatctctgcagatttagcagaaataaaatcctctgtgtgatagtttcacaaaacgatgcagtattaagttaggactctaagcgtcgctgttgaccaacctgggcaagaaaatcaacggaaactcaagttacatcctccaacaacaaagcaaattagacgggaaagcaggaaagctgtgcagaaattctgacctgaaacgcttcgcatccggtctctgcttgttgaaggaccttcaccgctatttctgagaagagcaaaagtgatgcagatctgttcttcctcttcttaatcccagagaagttcctaataagccagtaatggcgcctccgcagaggcatccgcagcgcagcgagcaggtcctgctcctcacgctcctggggacgctgtggggggccgcggcagcgcagatccgctactctattcccgaggagctggagaaaggctccttcgtaggcaacatcgtcaaggatctgggactggagccccaggagttggcggagcacggagtccgcatcgtctccagaggtaggatgcagcttttctctctgaatccgcgaaacggcagcttggtcaccgcgggtaggatagaccgcgaggagctctgtgctcagagcccgcggtgtctggtgagttttaacatccttgtcgaggataaactgaatctttatcccgtggaagtggaaatagtggacattaatgacaatacaccccgattcttaaaggaagaattggaagtgaaaattctcgaaaacgcagctccatcctctcgttttccactaatggaggtctatgaccctgatgtgggaatgaactcccttcagggatttaagctcagtggtaatagtcacttctcagtggacgtgcaaagcgaagcccatgggcccaagtacccggagctggtgctggagggcacactggaccgggaaggagaagccgtttaccgcctggtccttactgccatggatggcggcgaccctgtccgctcaagcgtcgcccaaattctggtaacagttctagatgtgaatgacaacactccaatgtttactcagcctgtctaccgtgtaagtgttcctgaaaacctgccagtaggcacaccagtgttggcagtgactgccaccgaccaggatgaaggagtccacggggaagtaacttattcctttgtgaagattacagaaaagatctcacaaattttctgtttgaatgttttgactggagaaatttcaacttctgcaaatctagactatgaggactcgagtttttatgagctgggtgttgaagcccgggatgggccaggtcttcgagacagagcgaaagtcttaataactatcttggatgtcaatgataatgtaccagaagtggttgttacatctggaagcagaacaattgctgaaagtgcacctccaggaacagtaatcgccctttttcaagtgttcgatcgagactctggcctgaatggcctggtaacctgttccatcccgagaagtctcccatttgaattggaaaaatcagttggcaattattatcgattagtgacaaatgcagctctagaccgggaagaggtattcttgtacaacatcactgtgacagccacggacaaaggaacaccacctctgtctacagaaacaatcatctctctaaatgtggcagacaccaacgacaacccgcccaccttcccccattcatcctactcagtctatgtccttgaaaacaaccccaggggtgcctccatcttctctgtgaatgcactggaccctgacgtggaccagaacgcccaagtctcctactcactggcagaagacaccctccagggggcgcccctgtcctcctacgtgtccatcaactccgacactgggattctgtacgccctgcgctccttcgactatgagcagttgagagacctacagctgtgggtgacagccagcgacagcggggacccgcctcttagcagcaacgtgtcactgagcctgtttgtgctggaccagaatgacaatgcgcccgagatcctgtaccccgccctccccacagacggttccactggcgtggagctggcgccccgctccgcagagcccggctacctggtgaccaaggtggtggcggtggacagagactcgggccagaacgcctggctgtcctaccgcctgctcaaggccagcgagccaggacttttctcagtgggcctgcacacgggcgaggtgcgcacggcgcgcgccctgctggacagagacgcgctcaagcagagcctagtggtggccgtccaggaccacggccagccccctctctccgccactgtcacgctcaccgtggccgtggccgacaggatccccgacatcctggccgacctgggcagcctcgagccctccgccaaacccaacgattcggacctcactctgtacctggtggtggcggtggccgcggtctcctgcgtcttcctggccttcgtcatcgtgctgctggcgctcagactgcagcgctggcacaagtcacgcctgctgcaggcttcgggaggtggcttagcgagcatgcccggctcgcactttgtgggcgtggaaggggttcgggctttcctgcagacctattcccacgaggtctcactcactgcagactcgcgtaagagtcatctgattttcccccagcccaactatgccgacacgcttatcaaccaggagagctatgagaaaagcgagcctcttctgataactcaggatttacttgaaacgaaaggagaacccaggcaacttcaggtgagtttctttccgcctaagcgggaagagtaatctgatcttcccgcaacccaactaatcagacaggctcatcagctagatcggctgttatagaagcgaacctcttttggtacaggaagattcgtgattttgtaaagtggaagactcccttgttcaggtgagggtatcgtttttttttttttttttttttgagacggagtctcgctctgtcgcccaggccggactgcggactgcagtggcgcaatctcggctcactgcaagctccgcttcccgggttcacgccattctcctgcctcagcctccctagtagctgggactacaggcgcccgccaccgcgcccggctaatttttttgtatttttagtagagacggggtttcaccttgttagccaggatggtctcgatctcctgacctcatgatccacccgcctcggcctcccaaagtgctgggattacaggcgtgagccaccgcgcccggccgagggtatcgtttttattggttgacaggaaaattcaagattgtctttgattagtgcttagttttcttagccctttgcagagagtcacataattctaatgtttttcttttatatcaaaagaatgttctgaagtcttaattttgtgggggaaaataatgcatgtcctagtttttctttacctttctcttcttggcaaactatttgtgtcttggattgagtacatctcgtttcttaggttttttcctactatgtgacatttgtaaggttctttctttttctaatgtgggaaaaaaaataaccttaatttaggtcagtgttaaagatcaagatcttggttttagctagcatggtggttcacgcctgtaatcccacctcttcaggaggctgaggcaggaggatcccttgagaccaggagtttgagaccagcctgggtgactctgtctctaccaaaaagaaaaaaaagtagccagatgtgtggcgtacacctgtagtcccagctactcgagaagctctgataggaggattgcttaagtccaggggtatgaggctgcagtgagatataattgtgtcactgcaccctagcctgggagacagaatgagactttttctctctctctctcaaaaaaaaaaaaagattttgttttttctcagtgttacttgataactataaacgacagacgttcatacaagagatctttcacctttactacttaggaatcaaaaattatttttgaaaagataagaatcattggtaactgcagcaggggacaccagatctttggtgttaaaagacctgaataacattcctgtaactatctgttatttacttgggccagttacaatcgccattatcttccaattaaaattaagatttaaaagacttctcttatcagagataggatccccctctgttgcccagtctggagtaaaaatccacctgtaactgctgcttatagagtgtgtatccagggcaacttgaatctatgttcctgggttgcaatcctaaagcttggctcaaataagctctacttatattattttttaaaacaagactttccttatctatctgactcaaattctaagaaaataattttataactttttttcaaactctaaagcagcatagtgaacacgtatttgttgacatcaccattattataattattgggttgttaacaataactaagcaccgatgctgtgtgcctactacagtgtcttttgcatactgtgtgcctgatagtatttaagagtgaaaatggccgggtgcggtggctcatgcctgtaatcccaacactttgggaggccaaggcaggcatctcacgaagtcaggagttcgagaccagcctgaccaacatggtgaaaccccgtctctactaaaaatacaaaaattagccaggtggggtggcatgggcctgtaatcgcagctactcgggaggctgaggcaggagaatcgcttgaacccatgaggcagaggttgcagtgagccaagatcgtgccactgcactccagtctgggtgacagagcgagactctgtctcaaaaaataataatgataattaataaataaagagtgaacatgaattttaaaacatgctcggtagtgtctgcttacaggacatatctctaaaaatagatgactgactggtgaatgggagaacaaatgttaatgaggttcaaataaaaatttaaatattttagcattttaacccagacaataaggctttcatcatataggaactctttattgaaatatttcaagaaaaaagggattatcatttagaagactgattagtcttatttattatgactgaaatgtgcaaacagaatcattgtttcatgaacagaaaacagcagagtttttgactgtcaatgatgttcgaatagaaaatggatcactaaggagataggagattctgttatcgacagtcttcaaaagtaagttgatggccctggaatgaatggagtacaggggattctctaatttgatgacttgttgaactacattatagtcaagatttttctccagtcatgagttggaagattctacaatctggtggtattatagaatggattggccacttgtgcatctgaatttgttatgaatgtgtaagaaaaaagcaattgagaagataccttgaaaataaatgagaacctcctttgtaacctgactttgtcagtcttcttaaagataacattgagttgatgtgtttttaaataagctgctaagagtaatatgtgtttttctgaaccaatattgtggtatttacatttaaggaattgttatagatttatttatttcaagtttccaaaggtatatacctaaacaagagatctaatcatacacatcttcaaagctcattttcttgtatctttgtgatataatttgataaaataacaattttaaacaacttgaatcttggatattagtctcatgagttagatgggctgttatacatatgattatttcataaactctgaaagtgtgaatgttattttactatactaccaatttgggatgttaaactacatcttgagcatttgttgttatagggaaagctcactaactacttttcatggagatcaggctggtttattttattctcttattacctgtgaccatttcatttaaacaaataaaatatttctctgatggaaaaactaccaacttctactctcacaaaagtcattcactcatgtggactgaccaactgttaaacatcctggcagtcatggaatttgctaagttatggctaaatgaggttctttaatccacctgcaatacagatcattaataataagataggctatctgaggttttgagagttcagtatagaattttgaagcatcaggaaaaaaaactaccaaattattgtcttattcttattttatggtctgtgaaagcctcttttttttttttttttttttttttttttttgtcagagtcttgctctgtctcccaggctggaatgcagtggtgtgatctctgctcactgcaacttcctcctcctgggttcaagcgattctcctgcctcagcctcccaagtagctgggattacaggtgcatgccaccatgcctagctaattttcatacttttagtagagatggggttttaccatgatggccaggctggtctcaaactcctgaccttaagtgatccacccgcctcagcctctcaaagggctgggattacaggcatgagccactgagcccggcctgaaaggcattcatttctgatcaggcttctgttgaggtggcaattgtcaaaggggaaggagtaaaatctcagaggagaaacattggaagatacctatatctttgcttgagaatgaaaatctaaatggaacttcaaagaactgttttgttgtttgttttttagaaaaaaaagtcccaaaaaagaaaagagagaagataatcaattcgatgcccaggaagccaaatagactttacatagaattctttttaatgcaaccaaacaaatggtcaggattcttcccaatatctcagtcaacaataatatacactctttaaactatgaaatgatttcaatttgatacaatgagcttatgttagattttattaaacatatcttggcggtctagtaaagatctttaatatttaattttatgatgttcgataacttagaaaatgtgaatgctagagacaatgaagccatttactccatagggtatgtatgctttgtgttcggagtagtctataatttaatttaactagctcttatttccttttctccaaagaaggtaccaagacactataaattaattgagacttttttaaaacagtagaataagaaacaaatgtgagatgaaactatgaattttgaggcatcaggtaaaaatggatcaagacattgagagctataacctccaaacatgaaagtttgtttgaaaatatctacaagtgcttacattgtttaataatcatacactttgcttgcctcaacaagaagttcaaaagtactattaaacaaatagaatttaactccagtttacagaattcatctataatacctctattagttcctttaaacaaaatttatctactttgtgaatgcaaagataactatggattattttgatagatcaaaacagaatgtccttcaaagtgttccctgtattctggagcaatgccaccagaaagcagaaataggttacttaggagcctcccacaaaacgaagttaagctttcttagtgttagttctggattctcctcctggttccaccaactactctccaggacctagaagaatttacaaaccaagactgtttcttgccaggtctttattccagagcaggtcattctcttttattctgcaactatgtgaaaggagctttcttttctttctgctagcagagggtagcctcggatccatcaataatttagttttactctatcaacatcagtggagagacgagtacctctaaggatcctgtcaggacagtcctgcattttgctcaaatgctgtctagagatccctgttttctcaattacactagaatagagtaggatgaagatttgaattgcatactaggatgaagacttgaattgaattgcataatgaaaagaatcagccaatccattatccagtttcttatgaattcacagcccagtaggatctctgcagatttctgccttctgtagaaaatgggttgcttctatagctgattgctgcagccaagacaaacaacgatttctttctttttttctcacaagactgggagtgagaatatttggattccgacattgttctactactatataatcaataatcaggaacaaggcaaggcaattccctctttctttctttctttctttcttcttcttttttttttttttttttttttggcagagttttgctcttgttgtccaggctggagtgcaatggtgtgatctcggctcaccacaacctccacctcccgggttcaagcgattttcctgcctcagcctcctgagtagctgggattacaggcgcgcgccaccacgcccggataattttgtatttttagtagagacggggtttctccatgttggtcaggctggtctcaagctcccgacctcaggtgatccgcccgcctcggcctcacaaagtgtgggattacaggcgtgagcaacagcacctggccccccctctcattttttaaacggttaaaatgaaggtgttagaccgtctctaaggttctatacaatcaaaaatttattaaaataggtctatatattttacaacaattttgactttctgaatcttgcatcatggtgtctagaacatatgtgttcaattaatactgaattaattaaaatttatatacactgatgtaaatattttctaagtaaaatctttcatatgtatttaaataaaatttacctttttgccttcaataactgattttcccatgtgcaataacgtgtgagtcagtgcccaaaagagtcacttgaaagttgcaaggcaaagcagttttttaaaaattatctaagattatcaaacaccggtccatgaacactgttgcattaattcagtgtcttaaaatggatttttaattatcagggatatctagagcaaagaaatctaacagggaaattttgaaagatgaaacaattttctatgaaatcagtgtattgtgtgcatcaatgtggtgcagtaacttagtaaggactcacagcgccgctgttcaccaaccagggaaaaatggtgcgagagatcccacagaaaccaccgagttttacagcacagagaaacgacagattgcgataagccctcttccaggctgcactaaactcaagcctctatcctgctggattctgagctccccttcctaagacagaggggtccacccggatacacccgcattctgaagcacttcccgagatcggcgcctaagcaagagaagcaggacgactatggcggctcagccgaggggcggggactacagaggattcttcctgctctccatcctcctggggaccccctgggaagcctgggcaggacgtattctctactccgtgtcggaggagacggacaaagggtcctttgtgggagacatcgccaaggacctggggctggagccccgggagctggcggagcgcggagtccgcatcatctccagaggtaggacgcagcttttcgccctgaaccagcgcagcggcagcttggtcactgcgggcaggatagaccgggaagagatctgcgctcagagtgcgcggtgtctggtaaactttaacatcctgatggaagataaaatgaatctttaccctatagacgtggaaataatagatattaatgacaacgttccaagattcttgacggaagaaataaatgtaaaaataatggagaatacagctcctggggttcggtttccgttaagcgaggctggggatccagatgtgggcacgaactccctccagagttaccagctcagccccaatcgccacttctccctggctgtgcaaagtggagacgatgaaactaagtacccggaactggtgctggagcgggtgctggaccgggaggaagagcgggttcaccacctggtcctcacagcctctgatggcggcgacccgccccgatccagcaccgcccacatccaggtgacagtggtggatgtgaatgaccacacgcctgtcttctctctgcctcagtaccaagtaactgtccccgagaatgtgccagtgggtacaagactgctcacggtacatgctatcgacctggacgagggagtcaatggggaagtgacatattcttttcggaaaataactcctaaacttccaaagatgtttcatctgaactcgcttacaggagaaatatcaactttagaaggattagattatgaagaaactgccttctatgaaatggaggttcaggctcaagatggtcctggtagtctgacaaaggcaaaagtactgatcacagttttagatgtaaatgataatgctccagaagtgactatgacgtctttaagtagctcaatccctgaagacacacctcttgggacagtcattgctcttttctacctacaagacagagattctggaaagaatggtgaggtgacctgcaccattccagaaaacctaccttttaaattagaaaaatcaatagataattattatagattggtcacaaccaaaaacttggaccgggaaacactctctttgtataacatcacactgaaagccacagatggtggaactcctcccttgtccagggaaactcacatattcatgcaggtggcagacaccaacgataacccacccaccttcccccactcatcctactcagtctacatcgctgagaacaaccccagaggggcctccattttcttagtgactgcacaggaccacgacagtgaggataatgcccagatcacttattccttggccgaagacaccatccagggggctccagtgtcctcctatgtctccataaactctgacactggagtcctgtacgcgctgcaatcctttgattatgagcagttgagagaactacaactaagagtgactgcacatgacagcggggacccgcctctcagcagcaacatgtcactgagcctgttcgtgctggaccagaatgacaacccgcccgagatcctgtacccggccctccccacagatggttctactggcatggagctggcaccccgctccgcagagcccggctacctggtgaccaaggtggtggcggtggacaaagattcaggccagaacgcctggctgtcatacctcctgcttaaggccagcgagccaggactctttgcggttgggctgtacacgggcgaggtgcgcacggctcgggccctgctggacagagatgccctcaagcagagcctcgtggtggccgtccaggaccacggtcagcctcctctgtcagccaccgtcacactcaccgtggctgtggctgacagcatccccgaagtcttggccgacctgggcagccttgagccctccgacggtccttacaactatgacctcacgttgtacctggtggtggcggtggccacagtctcctgcgtcttcctagccttcgtcctcgtactgctggcgctcaggctgcggcgctggcacaagtcacgcctgctgcaggcttcagaaggtggcttggcgaacgtgcccacctcgcactttgtgggcatggacggggtgcaggctttcctgcagacctattcccatgaggtctccctcaccgcggactctcggaagagtcacctgatcttcccccagcccaactatgtagacatgctcatcagccaggagagctgtgagaaaaatgattctttgctaacatccgtagattttcaggaatgtaaagaaaacctgccaagtattcaggtgagcccagcccttcctttatttccatgaggaatttatttgcatgatatttctctattattttgcaaaacaaatgttttgaaaatagggatttaaaaaactttatagaggtaaaaatgagtttaccagtttccttcagtggtgacactttaatatagaacacataggatatagtatttctttagtgaaagcctatggacaagattatgaatatgtggactatcacattttataatttccacctactttccaatctatgttccaacctactttcttaactcatatattttatacattggaatgaatcgagtctttcatattgcacaaggttagcaggaataaaacacacctcagctgtcttctcaggattctctttagcattcaaatatgtaaaaggttctgaaagatttcttccatgtgaagatttttttctgtggctgattctgcctccatgtacctcagcttggtggtcctaaaaaatcttgattgcttcttgacctatttacagtataatcatttattaatggggtggtagtagaaggttggatttatgcctaaagaatgaaatgtgtgtgtatcacacttcactaagatctatatcaaagacagacatcaagtctaatgccacactaaaggccatcggacaaaaccaataaaatatgtcaaataaaatgtcattttaagtgttgtaattggcatttgtgacataggcaattacatgttttaacagagaattccagtatgttgttttagtggtacagccagatgaagtgtgtctgtgggctatcaaagtgggagattggggatactggctttgtttcaactgtctcacgtactcaaaccttagaccatcttatgtacacagatcctagaccagtagttgattttatttattaggtctactgaaaaattcagttggaaataacccaatctgggattaactacttccatattcttttgtataacattttagtaaagctcagtatatcaagtgattgtcatccagaaggggtggatgacaaggtaatcttgattccagagacctttgagtattaattaaaaacacacttttagccaggtatggtgttgcaagctgtagcccacctgcatgggaggctgaggcaagaggacagcttgaacccaagaattggaggcccacctagataatataacaagactctgtctcttcaaaaaaagactctttttagactagtgttgtatttggtagtattttgcacatgatagactctgtacaatagtgtgggggatacattttttttttttgacatggagtctcgctctgtcacccaggctggatacattttacaagttctgcagtgttcacatttcagatgtacaatcacttggggtagaagacaatgttgctgacaccaacaatgttactgagggaagatcctatggcagaactacggttataaggtattttgtaaaagaaaatctcctgaccaaaatttattagatgcataaaattgtttttaagcaatggagagacataatcactaaactcagtgagctattgcaatcaaactttccagggattgtttccttcaattcagaggtcaccaaggaatgtaaaataagtgcagaggtaggaagcagtgcttcagtgcagcagatctcagtgactttgtgttttgaggctatgtattatccccctgataactttgaagatgaatgttgtatttcataaccagtaaaataattgtgtaatgaggagaggagtaggctactgcctgtgatcatcgaaatgagaatcacataatattcctgtaatgaaatcactgaaactattgggaagggggtgtatttgaagataagtataaattgcaccttctaaaaggcaattttggtattactgatactctccggaaaaagttgaaataaatcaacttggaggtacttagaaaagtggagaaaatgttaggaacaatgaaagaaagataaaatgtatccagtatatttctaatgagtaagtatggaaaattactgtactctgagacggtttaggccaagtctgtgttatggctatctttatatagatagtgcatgtttgaagattggggaaagcttatgtcaataaatgtttatgtacttaatctacatgatttgcctaaaaatcctcaaagttgggatgaaggcattcctaagagtacatttttagacgtcattaaatatacagacgtatccacgtagtttttgttctttcagttaggcacacaattataattattgcactggttaacttgaagcagcagaggctgtagtttcctagtgctgactctgggcgccgctgttggccaaagtggagagcttggcgctccagatctcctcgcgcagccgcagcgcgctttccagggcagccccagctcagactccccagcgccagcctttacaccgcttcctcctcggaaaaagaagaattttttcttgaactggaactgcaactaaagtccgttcggagatccaaaaatctgcaatacagaggttatttgtaacccggcgtctccaggctggtgagcaagctgaggagagcaagagggatggggagcggcgccggggagctgggccgggctgagaggctgccagtgctctttctcttcctgctgtctttgttctgcccggcgctctgtgagcagatccgctacaggattcccgaggaaatgcccaagggctccgtagtggggaacctcgccacggacctggggttcagcgtccaggagttaccgactcgaaaactgcgcgtcagttcggagaagccttacttcaccgtgagcgcagagagcggggagttgcttgtgagcagcaggctagacagggaggagatatgcgggaagaagccagcttgtgctctggaatttgaggctgttgctgaaaatccactgaacttttatcacgtgaatgtggagatcgaggacattaatgaccacacgccaaaattcacgcaaaattcctttgagctgcaaataagtgagtctgcacagcctggcacacgatttatattaggatctgcccatgatgcggatattggtagcaacacactgcagaattaccaactcagtcccagtgatcatttctcactgataaataaagagaaatcagatggcagtaaataccctgagatggtattgaagacacctttggacagagaaaagcagaaatcctaccacttgactttgactgccttggactttggagctccacccctaagcagcactgcacagatacacgttctagtgactgatgccaatgataatgctccagtgttcagtcaagacgtatacagggtgagcctttcagaaaacgtgtacccggggaccacggtgctacaggtgactgccacggaccaggatgagggtgtcaatgccgagattactttctctttcagtgaagctagccagatcacccaatttgacctgaactctaacaccggggaaattactgttttaaatacattagattttgaagaagtcaaagaatattccatagttttggaagcaagggacggtggaggaatgattgcgcaatgcacagtggaggtagaagtcatagatgaaaatgacaacgccccagaagtgatattccagtctctacccaacctaattatggaggacgccgagctgggaacacatattgctttgctcaaagtccgtgacaaggattccagacacaatggagaagtgacttgtaaattggaaggtgatgttccatttaaaatattaacttcttcaagaaacacgtataaattagtgacagatgctgttctagaccgcgagcagaatccagagtacaatataaccgttacggcaacagatcggggcaagcctcccctctcctccagttccagcatcaccctgcacattggtgatgtaaatgacaacgctccggttttctcacagtcttcctatatagtccacgtggccgagaacaacccgcctggagcctctatttcacaagtcagggcttctgatccggacttggggcccaacggccaagtctcttactgcatcatggccagtgacctggagcagcgggagctgtcatcctacgtgtccataagcgcggagagcggggtggtgttcgcgcagcgcgccttcgaccacgagcagctgcgcgccttcgaactcacactgcaggcccgcgaccagggctcgccagcgctcagcgcgaacgtgagcctgcgcgtgttagtggacgaccgcaacgacaatgcgccacgggtgctgtaccccgcgctgggtcccgacggctctgcgctcttcgatatggtgccgcacgctgcagagcctggctacttggtgaccaaggtagtggcggtggacgcagactcaggacacaacgcctggctgtcctaccacgtgctgcaggctagcgagcccgggctcttcagcctggggctgcgcacgggcgaagtgcgcacagcgcgtgccttaggcgacagggacgccgtccgccagcgccttctggtcgccgtgcgtgacggtggacagccaccactctcggccactgccacgttgcacctggtcttcgccgacagcttgcaggaggtgctgccggatatcactgaccgccccgacccctctgacctccaggctgagctgcagttttacctagtggtggccttggccttgatctcagtgctcttcctcgtggccatgattctggccattgccttgcgcctgcgacgctcctccagccccgcctcctggagctgcttccagcctggtctctgtgttaaatccgaatccgtggttccccccaactacagcgaggggactttgccttattcctacaatctatgtgttgcacatacaggaaagacggagtttaatttcctaaaatgtagtgagcagttgagttcaggacaagacatactttgcggtgattcatctggggccttatttccactttgtaattccagtgaattgacttcccatcaggtgagtttcctttaagtataatttaatgctcattgcctacccatttctccatattcacaagaaaatatacatatttgcaggaaaatatataatttttagatgtcatggatcattttaggaaagttgtagtcagttaaaaagctgtcatatcattctacaaaggaggagtaaagtaggagcaattgtgtggcccaacatttgtttgttttttagccaagcttagatttataaagcaatgagggtgtggttttaaccacaaagtgaaagtgttagacagttgttggctctctcctaaaaagtgaatgagatttttcctatacattttccttcttgttgactaatatatgatgaatacttttttcagcttggatataccataaatataaaaataataaagccaaagaatttaagctaaaattcaacacttttcttaactaatttaactggtatggtctccatagtagtccactgttttgtttcctgtgttaacttcccttttgtttcaaaagctcttagaataaggagtcaactggatttttatgtccatggaccccttgtgattatatgcagtgtacgctgtgtgtgcgtgtgtgtgtgtgtgtgtgtgagagagatccttttacttagaaaaaggtctactatgctcattagaagatcaaaagcagattctccttacttgtaacataggagtttcaggattaatctgtattcaagctcattctatatccttcatcaaagaaaagacaatgttttgtgtctgttgtccctctcacacacagccctaatatataatgtgtaactgccttatctgcagccctaaactaatatagctagaggtcttctaatcattctcctacctctaggaaagaaatatagtcttgaaaactgccaatctggtgtgcatacaaaatatatacaaaataccaaggaacattatatgagccttttgctaggtatatctaagcaactgcttcagttaatggccactttacaaattgctgaaagaaggaaacgtctttcgattcttttttttttctttttttttttttgagacagagtctctgtctgttactcaggctgtagtgcagtggcacaatgatagctccctccagcctcaaactcctgggctcaagcattccttctgcatcagcctcctgactagctggaactcaggctcatgccaccagacctggctaatttttctgttttcagtagagaaaatattttctttcactaatttaactggtatggtttccattgtctacccagttttccatatgcataagaaaatatattcacaggaaaatataaagttttcagatttcatgagtggttttaagaaagttttagtcagtgaaaaaactatcataccagtcttcaaaggaagggtgaaataagttcatctgctacgttgcccaggctggtcttgaagggaaacagacttttttgtagtcatacttatcctttggcttcttagtaagtattatatagtcattactttttgcagttttttagatcaaagtgttaatgtaggtaaagttaattttagaatatatgtaaaagtcaagtctgctttaaatttaatcatctctttggtgaaagggatgggatggagctttgctttttatcatatattcatctgtacctttcaagtattcaaatagaaaaatataaacaatgtaaataaaatagcaaaacaatgtaatatctcataaaactgcaatggtaaaagcatttatcctattgaaattccacaatttttatttgaaaatattatcgacatgtaattcaagtggcatttagaagaataatttaaaagcaacaactctatagaaagcttgtaaaatgattaagtagtttaaaccaaataaaacaatttctgagtcagtcatctccagtaggtctattttagtctcaagataaattcatttctggtgacaactgaagttcttagttatttgttagtatatattggagacatttacaataaagcttagagcacaatgggaaatgaaagtatcatgttttttttaagaccaaatgtattgcagaaatgtgagtaatttaatccgatgctacaatctgatcattctgatctaatctgatcatttaataacactaaataaaaccttcatctcacattctttggctgtttcttttaaaatatgggtttacggataaatcaaataaattcaaaacaaagtaataagcaaatgatttttttttctcagtaatctagtagagtattacatttagaagtaatctgtatctcagtgcagtaactatttaggactgtaagcgccgctgttcacctactggaagacaaatgcaaccgaaaacactcagatctcacacctcacgaagacccgcagatgccacaaactaactgctggactgcagcgaaacccgacccctgtttggaggcactccaggtttccggaggattgtcatctccatagctgcggcaagaaactaaataagacccatttatgcacagtgaagattctgagaggattctgcagcaaaacaacaatggccgctccacagagtcgccccagacgcggcgagctgatcctgctgtgcgcgctgctgggaacgctgtgggaaatcgggaggggacagattcgctactctgtgccagaagagacggacaaaggctccttcgtgggtaatatctccaaggacctggggctggacccccggaagctggcgaagcacggagtccgtatcgtctccagaggtaggacgcagctctttgctctgaacccgcgcagcggcagcttgatcaccgcgggcaggatagatcgggaggagctctgcgctcagagcccgcggtgtctgataaatattaacaccctggttgaggataaaggaaaactctttggggtagaaatagaaataattgatattaacgataataacccaaaattccaggtcgaagatctagaagtaaaaattaacgaaatcgcggttcctggagcacgttatccactcccagaagctgttgacccggatgtgggcgtgaactccctccagagctaccagctcagccccaatcaccacttctccctggacgtgcagactggagacaatggagccataaacccagagctggtgctggagcgcgccctggacagggaggaagaggctgctcaccacctggtcctcacggcctcggatggcggcaagccgcctcgctctagcacagtgcgcatccacgtgacagtgttggatacaaatgacaatgccccggtttttcctcacccgatttaccgagtgaaagtccttgagaacatgcccccaggcacgcggctgcttactgtaacagccagcgacccggatgagggaatcaacggaaaagtggcatacaaattccggaaaattaatgaaaaacaaactccgttattccagcttaatgaaaatactggggaaatatcaatagcaaaaagtctagattatgaagaatgttcattttatgaaatggaaatacaagccgaagatgtgggggcacttctggggaggaccaaattgctcatttcggtggaagatgtaaatgacaatagaccagaagtgatcattacgtctttgtttagcccagtgttagaaaattctcttcccgggacagtaattgccttcttgagtgtgcatgaccaagactctggaaagaatggtcaagttgtctgttacacacgtgataatttaccttttaaattagaaaagtcaataggtaattattatagattagtgacaaggaaatatttggaccgagaaaatgtctctatctacaatatcacagtgatggcctcagatctaggaacaccacctctgtccactgaaactcaaatcgctctgcacgtggcagacattaacgacaaccctcctactttccctcatgcctcctactcagcgtatatcctagagaacaacctgagaggagcctccatcttttccttgactgcacacgaccccgacagccaggagaatgcccaggtcacttactctgtgaccgaggacacgctgcagggggcgcccctgtcctcgtatatctccatcaactctgacaccggtgtcctgtatgcgctgcaatctttcgactatgagcagatccgagacctgcagctactggtaacagccagcgacagcggggacccgcccctcagcagcaacatgtcactgagcctgttcgtgctggaccagaatgacaacgcgcccgagatcctgtaccccgccctccccacagacggttccactggcgtggagctggcgccccgctccgcagagcgtggctacctggtgaccaaggtggtggcggtggacagagactcgggccagaacgcctggctgtcctaccgcctgctcaaggccagcgagccgggactcttctcggtgggtctgcacacgggcgaggtgcgcacggcgcgagccctgctggacagagatgcgctcaagcagagcctcgtggtggccgtccaggaccatggccagccccctctctccgccactgtcacgctcaccgtagccgtggctgacagcatccccgaagtcctgaccgagttgggcagtctgaagccttcggtcgacccgaacgattcgagccttacactctatctcgtggtggcagtggctgccatctcctgtgtcttcctcgcctttgtcgctgtgcttctggggctcaggctgaggcgctggcacaagtcacgcctgctccaggattccggtggcagattggtaggcgtgcctgcctcacattttgtgggtgttgaggaggtacaggctttcctgcagacctattcccaggaagtctccctcaccgccgactcgcggaagagtcacctgatctttccccagcccaactacgcagacatgctcatcagtcaggagggctgtgagaaaaatgattctttgttaacatccgtagattttcatgaatataagaatgaagctgatcatggtcaggtgagtttagttctttgcttgcttttaatttccagatgaattttatttggcataaattatgttttgaaaaacattgtgaagatagttgaaaataatttttaaggtgtatcacagagttttgggtttattttggtggtgttactataaaattgaactctaatagtcataggttattgtttcatttgcttttaaacgacttggaaaagattgttcaaccattttaagccttccagtattttattcctattatcactcattcacttaagaagtagctacccgtccatactggtaattttgctattgtttgtgtgtgtgtgtgtgtgtgtgtgtgtgtgtgtgtgtgtgtgtgtgtgtatcccaaactagaacttcagaaaattatcaagaagtctaaagccttgttattagcttagcaaaagtaaaatatatctcagaatttttagggttatgtttagcatttgaacctgtaactaggctcttgtagatttcttcactttaaacctcttttctgagccctgtttctgtaccagtgcccttcaaaactttaatacttcttaccatccttcaaaacatgaacaaactttaaagatggatcttggtgggagatgagactggttactaaatattaagtatgtgagtcagtggtcacctgggctccatgcccatggagacatgaaatctaaagcctagaatgtccattgctcccccaaacaaaaaacaaaagcaaaaacattagatctgaattaaaatgtaattttaaactgttgaaagtgacttttgtaaaatatgtaagaacatatttcaatacaattccaattagctgtttcggttgtgcattgatgtgaagtggtgagaatgttgatattaagaaccaatgtttcaggtacacaagttctaaataagctgatcaattcaattaaagttattcagtcttggctggacacagtgcctcatgtctgaaatcccagcactttgggaggctggggcaggaggaccgcttgagccccgggggtttgaaactgcagtgagctatgatcatgccactgcactccagcctaggtggcagaactagaccctgtctctaaaaaaactattattaggccgggtgcggtggctcacgcctgtaatcccagcactttgggagactgaggtgggtggatcacctgaggtcaggagttcaagatcagcctggcaaacatggtgaaaccccgtctctactaaaaactacaaaaattagccaggcatggtggcatgcgcctgtggtcccagctactcgggaggctgaggcagaagaatcacttgaacccgggaggtggaggttgcagtgagcctcgatcctgtcactgcactccagcctgggcaacagggtgagactccgtctcaaaaaaaaaaaaaactaatattaatagtaaaaactcggtataggctatccattattgtattcctgcataccttcttgtagcatttgaataaagctaatacctgaattgattgttgtaaggtagaagtagatgacccaataaatgtttgttattaatgaaaaggacatttcctaaggattgtgtagtgttctactgtatggtgcatattcagtggagtgggagttaacttcatagtttgtgtaccatttggatgcacatttgagaggacaacatattattggcactttgcaattttaaaaactcggatgaaagttgccctggtaggaaagaaaatccttactctccctaaaaatgttggctagttgtttttattaatctgacaaatggactaaagaaggttgaccaatgtccacaaatttatgtaaatgaacttatgagcttcatttatccaattccaaagtcatttcagataggataataatgcaatccactagaatatccctttgtaccttgtattgcagaatagataagcatttccccaataactcttaagaatgaatttatgtactgtaaaagatatgacataagagaagtattttgagatatgaagaagagcaacgtagtagggtatatcatttcttagctacatcatatgggcagtatacttgaatgaatatttcctgaagtagaagagtaaagaaaaattatttttataaagaatgttaatatagtcaggaagaggagatgtttggggattggtataaaattgccacaactttacaaaatagttttaaatagtatagatttccctaatatgtgtaatataaaacactagaaatattggggagttggaaatcatagaaatgaacagaagaatgataaaattgtttccatagctaataaaaaatgaatttttgaaatcagtatagtatgaaggctctgagagcaagaactgtatcatattaattattatattgccagtgacaagggcaatacttagttctagctaagagttcaaggtatgtttgcagaatggtgaaagaatggaccaatgtatgcaggtttgtataaaaacccaacgtgatatttctaacaatttggaaaacagagaaagataccttaaagaagttgttataattttttattaagtatatggacgtaaaaacttggcttgttaagttaggcacacaaaaacaattactgcactggttaacttgaagccgcagaggctgtagtttcctagtgctgactctgggcgccgctgttggccaaagtgcagagcttggcgctccagatctcctcgcgcagccgcagcgcgctttccagggcagccccagctcagactccccagcgccggcctttacaccgcttcctcctcggaaaaagaatcgtttcctaaactggaactggaactaaagcccgttcggagatccaaaaatctacaatacagaggttatttgtaacctggcgtctccaggctggtgagcaagctgaggagagcaagagggatggggagcggcgccggggagctgggccgggctgagaggctgccagtgctctttctcttcctgctgtctttgttctgcccggcgctctgtgagcagatccgctacaggattcccgaggaaatgcccaagggctccgtagtggggaacctcgccacggacctggggttcagcgtccaggagttaccgactcgaaaactgcgcgtcagttcggagaagccttacttcaccgtgagcgcagagagcggggagttgcttgtgagcagcaggctagacagggaggagatatgcgggaagaagccagcttgtgctctggaatttgaggctgttgctgaaaatccactgaacttttatcacgtgaatgtggagatcgaggacattaatgaccacacgccaaaattcacgcaaaattcctttgagctgcaaataagtgagtctgcacagcctggcacaagatttatactagaagtagcagaagatgcagatattggcttaaactctctgcagaagtataaactctctcttaacccaagtttctcattaataattaaggagaaacaggatggtagtaaatacccggaactggcactggagaaaaccttagaccgggaacaacagagttaccatcgtttagtcctgactgccttggacggtggacatccacccctaagcggcaccactgagctccggatccaggtaaccgacgccaatgataatcccccggtattcaaccgagacgtgtacagagtcagccttcgggaaaacgtgccaccaggcaccactgtgttgcaagtgtcagccactgaccaagacgagggcatcaactcagaaattacttattccttctacagaaccgggcaaatctttagtctgaattcaaagagcggagaaattaccactcaaaagaaactggattttgaagagaccaaggaatattcaatggttgtagaagggagggatggtggtggactggttgcacaatgtacagttgaaattaatattcaagatgaaaatgacaatagcccagaagttacattccattctctacttgaaatgattctggaaaacgcggtgcctggaacactaattgctttgatcaaaatacatgaccaagattctggggaaaatggggaggttaattgtcaattacaaggcgaagtcccttttaagattatctcttcatccaaaaattcgtataagttggtaacagatggaaccctagaccgagagcaaaccccggagtacaatgtcaccatcacagccacagacaggggcaagccgcccctctcctccagcataagcgtcatcctacatatcagagacgtcaacgataacgctccggttttccaccaggcgtcctacttagtcagtgtacccgaaaacaaccctcctggggcctccatcgcgcaagtctgcgcctcggacctggacttggggttgaacggccaagtctcctactctatcatggccagcgacctagagcctctggcactggcctcttacgtgtccatgagcgcgcaaagtggggtggtgttcgcgcagcgcgcctttgactacgagcagctgcgcaccttcgaactcacactacaggcccgcgaccagggctcgcctgcgctcagcgcaaacgtgagcctgcgcgtgttggtgggcgaccgaaacgacaacgcaccgcgggtgctgtaccccgcgctgggtcccgacggctctgcgctcttcgatatggtgccgcgcgctgcagagcccggctacctggtgaccaaggtagtggccgtggacgcagactcaggacacaacgcctggctgtcctaccacgtgctgcaggctagcgagcccgggctcttcagcctggggctgcgcacaggagaggtgcgcacagcgcgtgccttgggcgacagggacgcggcccgccagcgcctgctggttgctgtgcgtgatggtggacagccgccactctccgccaccgccacgctgcacttggtctttgctgacagcttgcaggaggtgctgccggatatcactgaccgccctgtaccctctgacccccaggctgagctgcagttttacctagtggtggccttggccttgatctcagtgctcttcctcctggccgtgattctggccgttgccttgcgcctgcgacgctcctccagccctgccgcctggagctgcttccaacctggtctctgtgtcaagtctggacctgtggttccccccaactacagtcaggggactttgccttattcctacaacctatgtgttgcacatacaggaaagacggagtttaatttcctaaaatgtagtgagcaattgagttcaggacaagacatactttgtggtgattcatctggggccttatttccactttgtaattccagcgagtcgacttcccatcctgagttggtgagtttcatttatgtctattctttttcattacccacccaattttctgtatttacatgaaactatcgtacattttcaagtccaatgagttgtcttagggaagtcagagctgctcagaaagctgtcctaccattctttaagaggagcagtaaattgtgagtttttatgtcgcataaaagaagtagccttatagatttacaaagtagtgagagtttgctcttagcttcctctctagcaaaaacatttggtgcgtttttttgtcctctttctcaaagctaatgaattttacctattcgttgtctcattctttaacatgtttatattttattgtatgtagataaaccattaaatttaatgtatgtaatcatttaattcatcttttaaagcaaagaaactgctagtagatgtctttcttcactgatttcactggtagttttcatctctttcttatgttcctcatatatgctttcttattcctacctaatggatttatgattttttgaatctcctaaaattttattaaaaatactatatgttggctgggtgcagtggctcatgcctgtaatcccagcactttgggaggccgaggcggttggatcacatggtcaggagttcaagaccagcctgggcaatatggtgaaaacccgtctctactaaaaatacaaaaattagctgggtgtggtggcgggcgcctgtaatcccagctactcaggaggctaagacaggagaattgcttgaacctggcaggtggaggttgcggtgagccgagatcactccattgcattccagcctgggcaacaagagcaaaactccatctcaaaaaaaaggaaggagaaggagaggaagaagaagaaaaatactacatgttatgtgtatgagagagaaagagagagactgattcactgaacttagaaggtccaaatcatccaaataattttctaagtttatccaggttttcttggatgcaaaatccttttccacctctatataattaccagaagaaacttacaaaaaaaaggaaatgctattgcctgaatttctcttgctcggaatcctgacatattcttgaagaaggggaaaaagacaccggatttgtcttatcgtttggagctttaaatataaatgactggatgttttctcaacatccttgtaggatggaaggtgaatacaggattattccatttttaagacaaaaactactagtcttgtgtacatacaaagctcccattacatggtataagtcttttgcttggtttcccttagtatgtgattcagtaaatgggttccttacaaagtgctgagatttcttataataccacttacttttaacctttcagtagttttctttgttgtatattttgtgttctttttcccaaattattatataagtttaagtgatgcttagaataatgtttaagaccactttaaaattgcataatttattgatgaaggattaaaatagaaacttgcttttcagtgtatatgcatttgaatcattgaaacacagtctgtgcatgcattacatattcacattaaaaaactaagcatttttgaaatagcagaaaagtttaagcaattacaaaaatgtgaaaatttccaactttaatcctgttaatatttagcaatattaggcgagaacatctgtaactattgctgaattaatattacttttataatacaaaaatttaaaataaacgtttttccaggaattttatcatcaaaataaaccccagaaaataatttcaaagtggataatctatccttatatatgtattaatacaattatatattttacatttacaaatatataggtataaaaattaaaaatgaatgtacttccaaacaagattgcacataaaaattacttcagaaaattgttaagatacacagaaaaaattgaagcatcataaaaaggaaattataatagtttacatatctagaaatagagtgcaaagttctaccaagaataagaataaattaatattaagcaatggtttgtgattttataatacacttacagaaattttattccactttatttacaactcagatatctaaaaaatagattgcttttgaaatacaaatgcaagaaacaattggagaaatctaaaatcataattagaagagagtagtgttttctttatcagccatctgatataatgttacacatcagtgggtgtagtaacggcttaggactctgagcgccgctgttgatcaactctaagcgaaaatcaggactccatccggatttccagttctgcggctacacaaaacccggcagataccacaaacctgctcccaggctgcagcaaaactcagcctctttcttctaaggaaaagatcaccatactttgcagggtggaagaaagaacctgatgaagcagcgcgcacagagatccttttgagaaaattccaaagcgaggcagcaatggcagctccaaccaaatgccagctccgcggaagattagtcctgctatgctcgctcctggggatgctatgggaggccagggccagtcagattcgctactcagtgcctgaagagacagaaaagggctatattgtgggcaacatctccaaggacctggctctggagccccgggagctggcggagcgccgagtccgcatcgtctctagaggtaggacgcagcttttctctctgaacccgcgcagcggcaccttggtcaccgcgggtaggatagaccgggaggagctctgtgctcagagcccgcggtgtctggtgaactttaaagtcctggttgaagacagagtgaaactgtacggaatagaaatagaagtaactgatattaacgacagcgccccaaagttccaggccgaaagtctggaagtaaaaattaacgaaatcgcggttcctggagcacgttatccacttccagaagctattgatccggatgttggcgtgaactccctccagagctaccagctcagccccaatcaccacttctccctgaacgtgcagactggagacaatggagccataaacccagagctggtgctggagcgcgccctggacagggaggaggcaactgcccaccacctggtcctcacggcctcggatggcggcgagccgcgtcgctccagcacagtgcgcatccatgtgacagtgttggatacaaatgataatgccccggtttttgctcaacggatttaccgagttaaagtccttgagaacgtgcccccaggcacctggctgcttactgcaacagccagcgacctggatgagggaatcaacggaaaagtggcatacaaattctggaaaattaatgaaaaacaatctctgctattccagcttaatgaaaatactggggaaatatcaacagcaaaaagtctagattatgaagaatgttcattttatgaaatggaaatacaagctgaagatggtgggggattgaaagggtggacaaaagtgctcatttcggtggaagatgtaaatgacaatagacctgaagtgaccattacatctctgtttagcccagtgagagaagacgcacctcagggaacagtaattcttcttttcaatgctcatgaccgagactccgggaagaatggtcaagttgtctgttctatccaggagaatctatcttttacattagaaaattcagaagaagattattacagattgttgacggcccaaattcttgaccgagaaaaagcctcagaatataatatcacggtgactgcaacagacagaggaactccgcccctgtccacagaaattcacatcaccctgcaagtgactgacatcaatgataatccacctgctttctctcaagcctcctactcagtctacctcccggaaaacaacgccagaggtacttccatcttctccgtgattgcctatgaccctgatagcaatgagaattctagagttatttactccttggcagaggataccatccaagggtctcctctctccacctatgtctctattaactcagacactggtgtgctgtatgctctgtgctcctttgactatgagcagtttagagatttgcaaatgcaggtgacggcaagtgacagtggaagcccaccacttagcagcaatgtgtcattgagactgtttgttttggaccagaatgacaatgccccagaaatcctgtaccctgccctccccactgatggttctactggtgtggagctggcaccccgctctgcagagcctggctacctggtgaccaaggtggtggcagtggacagagactcaggccagaatgcttggctctcctaccgcctattcaaggccagtgagccagggctcttctcggtggggctgcacacaggtgaagtgcgcacagctcgggccctgctagatagagatgcgctcaaacagagccttgtggtggctgtacaggaccatggccagccccctctctcggccactgtcacgctcacagtagccatagctgacagcatcccagacatcctggctgacctgggcagtcttcagatccctgcagacctggaggcctcagaccttaccctctacctcgttgtggctgtggcagtcgtctcctgtgtcttcctcaccttcgttatcacgctgctggccctcaggctgaggcactggcactcctcgcatctgctgcgggctaccagtgatgggttggctggtgtgcccacctcacactttgtgggtgtagatggggttcgagctttcctacagacctattctcaggagttctccctcaccgctgactcaaggaagagtcacctgatcttcccccagcccaactatgcagacacactcatcagccagcagagctgtgagaaaaatgagcctttgtgcgtctctgttgattccaagtttcctatagaagacacccctttggttccggtgagttcattttttttctttctttcttttctttttttgttttttgttttgttttgtttttgagacagagtcttactctgttacccaggctggaatgcagtggtgtgatctcggctcattgcaacctccgcctcccaaattcaagcgattctcctgcctcagcctcccaagtagagtagctgggactagagtagagtagctgggactacaggcctcccaagtagaataactgggactacaggcacgtgccaccacgcccggctaattttttgtgtgtttttagtagagacggggtgtcaccatgttggccaggctggtcttgaattcctaacctcaagtgatccacccacctcagcctcccaaagcactgggattacaggcgtgagccactgcgcctggcccttaactttctattatagttagctttctctttaactgtctgtacttaaggtagtataagttgatatcagtgtgtttctcatcacttttcactgggcctaattgttgctccaacactgaaaggaggcatttattagttatatttgctgatataactttcatgttctcataataattaacctgctgtcaacgtaaaccatacttcatggggtagctctcagcctgcattgatgtgggctttttgggtagggttgcttcattggttgcagtggactcatatcataaaattcttactcctttttttttttttttaagagatgggggtgtcattctgttgtccagggtggaatgcagtggtgtgggtaaagcttactgcagtctcaatctcctgggcttatgcaatcctcccacctcagccttcacagtagctaggactgaggtgggagggctagcaagctatgttgcccagactggtctcaaacgatcttcctgcttcagtttcccaaagcactgggtgaggtgtgaaccacctcacccagcaaattcttactcctacgatcatttattcaggtcatactatgtttgtaagggtaaactgataaaaaggtaaatgtattcttcttagagaaacagctgaaagcccagatttattgcttctattcttccatttctatgacaggaaaacacctctttgaggttatatttttcagatcacaagtgtgtaaagtctgtttgtgtttacagatattttctgacgaagattcaaacttcagttatccacttccaaaccctagtaaaccaattttttccctttaatggtgaaagttgtcacatcttttattctcatatcttcaaaggtcttaatttcctaatgctttaatgttaaattatggagaatagtaggacattcttcttttctatagtatatgcttgctcaagagaagtttctaagactggacactgtgaaatgacaaaacaaggaattaaaaatatttctctcacttatatattatttctggctcaattctccaacttttgagtctagaaatgaacttgcatatcagatataatttaagaaaatattctcaggaactgctgggaagattctaaaactattttactgtttttagctataaggaagagaataatgtattatttaatgttattttaaacatagtgttgtttcaaatagtaaataacatttcacaagacatttgaaaataagctttgaagttgactcaaaattctatgctaaacatgtgatccatagatacactgatgactgctggcatttctgtggaaatgaagaattgttttatttgtttgtaattatttgggtttcagttgctttatttttaagaaaaaaaagctgaagtgtctgggaatcctttatgacatacagacattttaattatttcaaacacgttttcccccttaagtgggtagcaaaaaaaataaagcatacttcaggctcatatttttaaccatgcaacaagaaaattgttacaatttctgttctgaggagtagccttcatacttagtatttataaatattgaaatgtatgttaatttggggaaaacataacagatatccatgaaggcttgtatgtcatggtaggtagttactattcgataccacaaaaatgtctcttgcccttaaaaccagaacacgaggctcaccagacagatgactgaatggagtatggaaaatctttatttctgtttttcttaggctatgtaggacttaacttattgtgcattggtaacagattgtagaacataagctgaaagataaaattcttgaccttaatgtctcatcttaaaaagaagcattggttgacattctatatctcgtattacttaaaaataatgggggagcgcagtatatattaaacaaagattggctttgtggtgatcattgttgaaggtggggtgatggctatgtgaaggttcactatatatactccctactgttgtataagtttgaaattgtgcataatagatttatttaaaacacaaagcatagaaatatctactataatattatggtgagagcaaaatttgagggggatgtacacctgcattttcgaagaatatatacatttcggagaccgaattcaaaatgaaaaaccgggctgctgtcccgcacggagcctctgggcgccgctgtcggccagtgcagagcaagcgctgacgccggggatccgtcagcctctggcctgggattccctgcgcagccaacaacagaaagaagaaaaccagctcccacacagagcctcccggctgcgcagacctttcccagcacagcggattgccagctccgagacccgggactcctcctgtcctgggccgaatgctcttttagcgcggtagagtgcactttctccaactggaaaagcggggacccagcgagaacccgagcgaacgatgggagggagctgcgcgcagaggcgccgggccggcccgcggcaggtgctatttcctttgctgctgcctttgttctaccccaccctgagtgagccgatccgctactcgattccggaggagctggccaagggctcggtggtggggaacctcgctaaggatctagggctcagtgtcctggatgtgtcggctcgcaagctgcgagtgagcgcggagaagctgcacttcagcgtagacgcggagagcggggacttacttgtgaagaaccgaatagaccgtgagcaaatatgcaaagagagaagaagatgtgagttgcaattggaagctgtggtggaaaatcctttaaatatttttcatgtcattgtggtgattgaggatgttaatgaccacgcccctcaatttgataaaaaggaaatacatttagaaattttcgaatctgcatccgctggtacacgactatcgcttgaccctgccacggatcctgatataaacataaactcaattaaagattataagataaactctaatccttatttttcattaatggttagagttaattccgatggtggcaaatacccagagttatctctggagaaactcctagaccgggaagaacagagatctcatagcttgatattgactgccttggacggaggggacccaccaagaagtgccaccgctcacatagaaatttctgtcaaggataccaatgataaccccccggttttcagcagagacgaatatagaattagtcttagtgaaaatctgccccctgggtcccctgtgttgcaagtgacagccactgaccaggatgagggggtcaatgctgagataaactactacttccgaagcactgcccagagcacaaaacatatgttctcattggatgagaaaacaggtatgattaagaataaccagtcatttgattttgaagatgtagaaaggtacaccatggaagtggaagcgaaggacggaggtggtctctctacccagtgtaaagtaatcatagaaatccttgatgaaaacgacaacagcccagaaataatcatcacttctctctctgatcagattttggagaattcacctccaggaatggttgttgccctcttcaaaacacgggatctggatttcggaggaaatggagaagtcaggtgtaatatagaaacagacattccattcaagatttattcttcttccaataactactacaaactggtgacagatggagccctggaccgagagcagacaccagaatacaatgtcaccatcgtagccactgacaggggcaagccgcctctttcttccagtagaagcatcaccttgtatgtcgctgacatcaacgacaacgccccagttttcgaccagacgtcctacgtggtccacgtggccgagaacaacccgccaggagcctccattgcgcaagtgagcgcctctgacccggatttggggctcaatggccacatctcctactctatagtggcgagtgacctagagcccctggcggtgtcgtcatacgtgtcagtgagcgcgcagagcggggtggtgttcgcgcagcgcgcctttgatcacgagcagctgcgcgccttcgcgctcacgctgcaggcccgcgaccacggctcgcccacgctcagcgccaacgtgagcctgcgcgtgttggtgggagaccgcaatgacaacgcaccgcgggtgctgtacccagctctgggtcctgacggctccgcgttcttcgatatggtacctcgctctgcagagcccggctacctagtgactaaggtggtagcggtggacgccgactcgggacacaacgcctggctgtcctaccacgtgctgcaggccagtgagcccggactcttcagcctggggctgcgcactggggaggtgcgcacggctcgagccttaggcgacagggacgcagcccgccagcgcctgctggtcgctgtgcgtgacggtggacagccgccactctctgccaccgccacgcttcatctggtcttcgcagacaacttgcaagagatactgccagacctcagcgaccgccctgtactctctgacccccaggctgaactgcagttttacctggtggtggccttggccttaatctcagtgctcttcctcctcgccgtgattctggccattgccttgcgcctgcgacgctctctcagccctgctacttgggactgcttccatcctggtctctgtgtcaagtctggacctgtagttccccccaactacagtgaggggactttgccttattcttataatctgtgcattgcacatacgggtacaaaagagtttaatttcctaaaatgcagtgtgcccctacattccaatgaagacatggtttgcagtgtttctcctggagccttaattccacctcatggtggggaggatttgacttcacatcctgagactctgacttcggtgagtttctcttttttgtgtgtgatttatctaatagtctactagtttctcatattttaggcatactactttattttcatatctagaatcatatgtttaaaatccatagctttttacaatattttctcaatgttttttcaattatagttttcactatgtatttggttcataagttgctctatctttttgtaaaataatgtcaccagactgaagatattttgtctttgtcttttttttttttttttttttttgagatggagtctcgcactgttgcctaggctggagtgcagtggcgtgatctctgctcactgcaacctccgccttctgggttcaagcgattctcctgcctcagcctcccaagtagctgggattactggtgcccctcaccacagctaaattttttgtatttttagtagacatggggtttcactatgtcgaccaggctgttcagaaactcctgtcctcgtgatcctcccaccttggcctctcaaagtgctgggattacaggcgtgagccacaatattttgtcaagttctgactatcgaacagaagcagtggtcttggcatctaagaaaacaaacaagtaacctatctattcaaatttgcgaagacttagtgaatttacgatatcttatttatatatttttaaagcctaaaaatattcagaagacaggcccagtggctcacacctataatcacagcactttgataggctgaatcggaaagtatcacttgagcccaagaattgagaccagcctgggcaatatagggagaccccccatctctactaaaacaacaacaacaaaaaaaaacattagcagagtgtggtagcattcccctgtggtcccagctacttgggaggctgagctgggtggattgcttggtcctgggaggtcaaggttgcagtgagccctgatcttgccactgcactccagcctgggcgacagagtgcgaccctgtctctaaaataaataaataaatatgcaggcagggccaagtgtgctgtaatcccagcactttgggaggtggaggtggagaatctcttgagcgcaggaatttgagaccagcctgggcaacacagggagactccatcgctacagaacatttaaaaattagcagggtgtggtggcacatgcctgtggtctcagctactctggtggctgtggtgggagaatcgcttgagcccaggaagtctaggctgcagtgagctgtctaggtgacagagtgagaccctgtctcaaaaaaaaaagacatttctaagaaataaatgaaatactattgcctttgcactcagtctctgtctctgattctctgatagaagatttttgaagaaaaaagataaaatctttgaagagttctatacttggaaggcatagtgacataaacacttctgaacatcctgttctctgtgtgaaagaagtgaacttctataccctttgcatttgagggaacaattgctactgggttgatgggcacacacagttgaagatatgtgaaccactggactttggcctctgatacaaactgcctaagagaagagattatttatactggtattaatgctctgatgaaaacaggtcatttgacataaacacttacttgttaaaaacctatatcactacatctaactttgttttctaaaacttttagtacttcaaattctacgtatttcttttctcattacaatgcaaacagtttaatttgcaactgtaatatatgttcattttagtttgtgattacctgcttaatcatttaaataggtccatttaacttgtatccctgtaagataaagtatgttttacacaaaaaggttaattaaggctcagtaaaactattctagaagagtactttaaaaacctcttacacaatcctaagctaaataagtttaatgaattaagtagttacaattataaagcttcagagtgaattatctcatgagtttatttaatataatctttgtatgaatgtatactaaataaaattggcctattcaaatcacaattttaaattataagacttttctgaatttacctagacactaatatgacctaaaataagtattatttaccttttattaaagtgtgtacatttctgttgggaaaacgtgttgcaaatatatatttaaccaaacattatcttgaaatatttacaatattttcactccactttatcacacctcccctaagaaacctacatatagtaaattatttaaagataggagtggagaaaccaaagaatctatgtaaaatataataatccaacagaatagtttactttccattgcatgtatcacttgggtgcagtaacttcttaggactctgagcgccgctgttcacctactaggagagaaaacgcagccagagctcaatccggattctcagggcttcaactacacaagccccacaaaccggctgctgggctgcagggaagctcactccagaatttaaagtgcccaggctacagagacaccctgaagccacagaaagacaaaggaaccggttgaaacacacaacgtgtccagtgaggactttgcagaattctgtaaccagactacaatggccgctcaaaggaatcgctcaaaggaatcaaaggattgcagcgggctggtcctgctctgccttttcttcgggattccatgggaggctggagcccggcagatctcctactcaattcctgaggaattagagaaaggctctttcgtgggcaacatctccaaggacttgggtctggcgccccgggagctggcggagcgcggagtccgcatagtctccagaggtaggacgcagcttttctctctgaacccgcgcagcggcagcttgatcaccgcgggcaggatagaccgggaggagctctgcgctcagagcgcgcggtgcgtggtgagttttaatatccttgtggaagacagggtgaaactttttgggatagaaatagaagtaactgatatcaatgacaatgctccaaaattccaagcagaaaatctagacgtaaaaattaatgaaaatgtcgctgcgggaatgcgttttcctctcccggaagctattgatccggatgtgggcgtgaactccctgcagagctatcagctcagccccaataagcacttctccctaagagttcagagccgtgccaatggcgtcaagtacccggagctggtactggagcactccctagatcgcgaggaagaggccattcaccacctggtcctcaccgcctccgacgggggtgaccctctccgatctggcactgtccttgtcagtgtgactgtcttcgatgcaaatgacaacgcgccggtcttcaccttgccagaataccgagtgagtgttcctgagaatttgcctgtgggcactcagctgctgacagtcacagccaccgacagggacgaaggtgccaatggagaagtgacatattcattccgaaaattacctgacacgcaattgttgaagttccaactaaacaaatatactggagaaataaaaatatcagaaaatctagattatgaagaaaccggtttctatgaaatagaaatacaagcagaagatggaggagcatatcttgcaactgcaaaagtgttgattacagtagaagatgtaaatgacaacagtccagagctgaccatcacgtctctatttagtccagtgactgaagattcacctctgggaacagtcgtagcccttttaaatgtgcatgatttagactctgagcagaatggacaggtaacctgttccattttggcgtatctaccatttaaattagaaaagtccattgacagttattacagattggtgatacacagagcccttgacagggaacaggtatcctcttacaatatcacagtgacagccacagatgggggaagtcctcctctatcaacggaagctcactttatgctacaagtggcagatatcaatgacaacccacctaccttctctcaagtctcctactttacctatatcccagagaacaacgccaggggtgcctccatcttctcagtgacagcgctggacccggacagcaaagagaatgcccagattatttactccctggctgaagacaccatccagggggtacctctgtcctcatacatatccatcaactcagacactggcgtcctgtatgcactcagatccttcgactatgagcagtttcatgagctacagatgcaggtgacagccagcgacagcggggatcctccactcagcagcaacgtgtcgttgagcctgtttgtgctggaccagaacgacaatgcgcccgagatcctgtaccccgccctccccacagacggttccacaggcgtggagctggcgccccgctccgcagagcccggctacctggtgaccaaggtggtggcggtggacagagactccggccagaacgcctggctgtcctaccgtctgctcaaggccagcgagccgggactcttcgcggtgggggagcacacgggcgaggtgcgcacggcgcgagccctgctggacagagacgcgctcaagcaaagcctcgtagtggccgtccaggaccacggccagccccctctctccgccactgtcacgctcaccgtggccgtggccgacagcatcccccaagtcctggcggacctcggcagcttcgagtctccagctaactctgaaacctcagacctcactctgtacctggtggtagcggtggccgcggtctcctgcgtcttcctggccttcgtcatcgtgctgctggcgcacaggctgcggcgctggcacaagtcacgcctgctgcaggcttcaggaggcggcttgacaggtgtgtccggctcgcactttgtgggcgtggacggggttcgggctttcctgcagacctattcccacgaggtctctctcaccgcggactcgcgaaagagtcacctgatcttcccccagcccaattatgcggacacgctcatcagccaggagagctgtgagaaaaacgatcctttgtctttgttagatgattcgaagtttcctatagaggataccccattggttccagtgagttttattttcatttttacttttgttaaaaaaaaaaagattggtttttactttgaagtttgcggcatgatggtggaaagtgtaaatgctaaaacactgatgagtagaatttgatgtttattaaggttttttttttttttttttttttttttttttttactttctggtaaaattcacctagtctcaatcaaggcctatatatcataaggctttgttatgattagctttgcagaaccttgtagtttatagtgttgttgagtacaatattgacaattcctaagacagacttccatacagaagtgcctgtcaatttatatttcctcctgggtggtcacatattgaaactccagccccttaagcaaccctcttgttctgaaggcaggtctggtaagaataggtaagtatcagaaagaaatcacctctggaaacacaacccaaatccaagaatactcaatgcagttcttcccaaggagaagggcaataggcctttttcaaactacattttatatatttttcaatctatactttgtggtgatagttgcagttgaatatactaagtttttcattaatattgaattaacaatttatttataacaatgtatgcttagatttttccagccctatttataactgataacactgcagtatcctttttgcatacaattctctaatttcacactgctatgtggaagatatagcattttaatttaactttcattgctcaatagggatcctgaggaggctatagagggtgaaattaagaatatttgggattctgcttttgtcttttttgttaaattttctagtgactaaggctgaaagtaaatatgggttgggaagacagataaatttgtacatgttcccgagaacaggagcaagagatatatgacaaagctatttcagtggctctttaatgtataaggaggcaaacacctgaaactctgaaaactctgaaattgagaggcaaaataaacttagagtcaagaaagaaatgccatttctgcagatcagaatataaacaccaaccacagctgtaaaaaagaaaagaatatatgcaacgaagggaaattatataaacaaaggatcattggaggtactgatgagttcatttagttcaatgaaaatagtgacgtattaggtagatctcttaattttattactagtattctactaaatgtggtagtataaagtcaaaaagcattccgaagtttctcaagacccttataattccatgatttttttcaggtcagtcaacatttgttgaatgataggtctgtggaaggaaagcacactctttagggtcatagttattaactattaaaccattgaaactattattttatatttgtgttaatgagagtcaaaattattgtgcattcatctcaaataattctattattttgaaaaatacaggttttttttttaaaaaaaactgctcttgacattgtagctattgtgagaaaatattttgattataattatttaaaagcaatacaggacaccctggatgatggtaatgactagggcaatggttgcattccagtacttaagtatgaaataaggaattattactttctgggtgaatataggctagaattgaagacaaaaaaatttgttgcttatcttcagtacttccagcttcatagataattactcttaaaaggaacaagaatgactgcctctggatggaggaattggatagcaatgggccgtgggataggagacctataaaccttcatgctatattattttgtgcctttttaaattttgaagaaaaaatattcatttattcaagatatatgtaaattcagtaaataaaaagatatgatagttatgaccaagtggaaatatatttcctgatgtaaaaggaatcactgaggaaaaagattaaaatattttggctgtcaactcgtagtttaaaaaaaattccttgaaagaggtagagaaaagtcaagttgcagtcccacacagagcctctgggcgccgccgtcggccagtgcagagcaagcgctgacgccggggatccctcagcctctagcctgggattccctgcgcagccaacaacagaaaagaaaaccagctcccacacagaggctcccggctgcgcagaccttgcccagcacaccagattgccagctccgagacccgggactcctcctgtcctgggccgaatgctcttttagcgcggtagagtgcactttctccaactggaaaagcggggacccagcgagaacccgagcgaacgatgggagggagctgcgcgcagaggcgccgggccggcccgcggcaggtactatttcctttgctgctgcctttgttctaccccacgctgtgtgagccgatccgctactcgattccggaggagctggccaagggctcggtggtggggaacctcgctaaggatctagggcttagtgtcctggatgtgtcggctcgcgagctgcgagtgagcgcggagaagctgcacttcagcgtagacgcgcagagcggggacttacttgtgaaggaccgaatagaccgtgagcaaatatgcaaagagagaagaagatgtgagttgcaattggaagctgtggtggaaaatcctttaaatatttttcatgtcattgtggtgattgaggatgttaatgaccacgcccctcaattccggaaagatgaaataaacttagaaatcagtgaatccgtcagcctggggatgggaacaattcttgagtctgcagaagatcctgatattagtatgaattcgctgagcaaataccaactaagtcctaacgagtatttctcattggtggagaaagacaatcctgatggtggcaaatatccagaattagtattgcagaagactctggaccgagaaacgcagagcgctcaccacttggtactgaccgccttagatggtggggaccctccccgaagcggtactgctcagataagaatcctggtaatagatgccaatgacaaccccccagtgttcagccaggacgtgtacagggttagccttcgggaagacgtgcctccaggcacctccatcctgagagtgaaggccactgaccaggacgagggcatcaactcagagatcacttattccttctttggtgtggctgacaaagctcagcacgtgttctctctggattacactacaggaaacattctaactcagcagcctttggattttgaagaagtagaaagatatacgataaacatagaagcaaaagaccgaggatctctctcaacacggtgtaaagtaattgtagaagttgtagacgaaaacgacaacagcccagaaataatcatcacgtcactctctgatcagattatggaggattcccctccaggagtggttgttgccctcttcaaaacacgggaccaagactcaggggaaaatggggaagtcaggtgtagcttaagtagaggtgttccatttaagattcattcttcttctaataattactacaagctagtaacagatgaggccctggatcgggagcagaccccagagtacaacgtcaccatcgcagccacagacaggggcaagcctccgttatcctccagcaaaaccataaccctgcacattactgacgtcaatgacaacgcgccggttttcggacagtcagcctacctggtccacgtgccagaaaacaaccagccgggtgcctccatagcgcaagtcagtgcctctgacccagacttcgggctcaacggccgtgtctcctactctctcattgccagcgacctggagtcacgaacgctgtcgtcctacgtgtccgtgagcgcgcagagcggggtggtgttcgcgcagcgcgccttcgaccacgagcagctgcgcaccttcgagctcacgctgcaggcccgcgaccagggctcgcccgcgctcagcgccaatgtgagcctgcgcgtgttggtgggcgaccgtaacgacaacgcaccgcgggtgctgtaccctgcgctgggtcccgacggctccgcgctcttcgacacagtgccgcgggccgcgcagccaggctacctggtgaccaaggtggtggccgtggacgcggactcggggcacaatgcctggctgtcctaccacgtggtgcaggccagtgagcccgggctcttcagcctggggctgcgaacaggcgaggtgcgcatggtgcgtgctttgggtgacaaggactcggtccgccagcgcctgctagtcgctgtaagagatggaggacagccacccctttcagccactgccacgctgcacctggtgttcgcagatagcttgcaagaggtactgccggatttcagcgaccatcccacaccctctgactcccaggctgagatgcagttttacctggtggtggccttggccttgatttctgtgctctttctcctcgcggtgattctagctattgctctacgcctgcgacagtctttcagccctactgcaggagactgctttgagtcagttctctgctccaagtccggacctgtgggtccccccaactacagtgagggaacgttgccctatgcctataatttttgtgtgcctggggatcaaatgaatccagaatttaattttttcacatctgttgatcattgtccagccacacaagataacctcaacaaagatagcatgctactggctagcattttaactcccagcgttgaagcagataagaagattcttaaacaggtaagtatttaaaaatgtatttaatcctttttatattacaatatgccaatatattccaatatagtggtattattttaagattctagataacttcttcatagagttcgcaaaatataggtcaaatttatggttatcattattaaaacaaaagtttaaattaaatgcctcagtcttcctactattcaaagacattttaaagcaaactacatgggtaatctccggtgacatttttatgaagtaaaatacctttcggttaaaaatataaaatacaggtatatttttacggcatggtattttaattgaaaccctgatgctactcaatttttctcaagtatttcatcttcatttactcaataaaggaaccttgtaagaattatagttaggcatcctacctgatgattttatcgggaccgtattatttccacttccagaaatgtcgttcctttcagtcggttaaaatcaattggaaccaactacaacctacaagttttcagctccagtaatattttgaaaactttttaaaaattaagcaagcccttttaataattactcctttcgcaggtgttcttggtaaagttttaacgtcacataatgtaagtattgtgtatcatcgtttttaagctctacaaatacgtgtgattcacaaaggtgagcgtaatcatttcttctggaatttcttagtcgttgcaataataagaatgggctctaggcgccgctgctcaccaatcagggaatgggaagctgcgcgccattgagtccctccctcccccgcctctaccacacaaagcggaatgagatggatactcacagatcctgacactggagacttagaagtattttccttcgctttctgatatattttggatgtagtcggcctaggacttcatagatacataagccgattcacaaccaaccagctcgagaaaccgcggaatatcggcttagagcctgccatggcgaatcggctacagcgcggggaccgcagtcggctgctgctgctgctgtgcattttcctggggacgctgcgggggttccgggccaggcagatccgatattcggtgccagaagagaccgaaaagggctccttcgtgggcaatatctccaaggacctggggctggagccccgggagctggcgaagcgcggagtccgcatcgtctccagagggaagacacagcttttcgctgtgaatccgcgaagcggcagcttgatcacggcaggcaggatagaccgggaggagctctgtgagacggtgtcctcctgttttttaaatatggaacttctcgtggaagacaccttgaagatttacggagtggaggtggaaataatagatattaatgataacgcccccagcttccaggaggacgaagtggagataaaagtcagtgagcacgcaattcctggggcgcgatttgctcttcctaatgctagggatccagatgtgggcgtgaactccctccagagctaccagctcagccctaataattacttttccttgcaactgcggggcagaacggatggggccaagaatccagagctagtactggagggaagcctggaccgagagaaagaggctgctcacctgctcctcctcacagctttagatggaggcgatcccatccgaaagggcgcagttcccattcgtgtggtggtcctcgatgtaaatgatcacatcccaatgtttacacagtccgtatatcgcgtgagtgttccagaaaacatcagctccggaactcgggtgctgatggttaatgcaacggatccagacgagggaatcaacggggaagtaatgtattcatttcggaacatggaaagcaaggcttctgaaatattccaattggattcacaaactggagaagttcaagtacgggggtctctggattttgaaaaatatagattctatgagatggaaattcaaggccaagatggtggaggtctctttaccaccacgacgatgttgatcactgttgtggatgtgaatgataacgctccagaaataactatcacctcttctattaattcaattctggaaaactctcctccaggtacagtgattgctcttctaaatgtgcaagatcaagattctggagaaaatggtcaagtctcctgttttattcctaaccacctgccttttaaattagaaaagacttatggaaattattacaaattgataacaagcagagtgctggacagggagttggtccagagctacaatataacgttgacagccacagaccagggaagcccgcctttgtctgcagaaactcatgtctggctgaatgtggcagatgacaacgataaccctcccgtttttcctcactcctcttactctgcctacattcccgaaaacaaccccaggggtgcctccatcttctcagtgaccgccctcgacccggacagcaaacagaatgccctggtcacttactctctgacggatgacactgtccagggggtgcctctgtcctcctatgtctctattaactccaacactggtgttctctatgccctacaatccttcgactatgagcagtttcgagacttagaactgagagtgatagcacgtgacagcggggacccgcccctcagcagcaacgtgtcgctgagcctgttcgtgctggaccagaacgacaatgcgcccgagatcctgtaccctgccctccccacagacggctccactggcgtggagctggcgccccgctctgcggaacctggctacctggtgaccaaggtggttgcggtggacaaagattcaggccagaacgcctggctgtcctatcgcctgcttaaggccagcgagccgggactcttcgcggtgggggagcacacgggcgaggtgcgtacagcgcgggcactgctggacagagacgcgctcaagcagagcctcgtggtggccgtccaggaccacggccagccccctctctcggccaccgtcacgctcaccgtggctgtggccgacagcatccccgaagtcctggcggacctcggcagcctcgagtctctggctaactctgaaacctcagacctctcgctgtacttggtggtggcggtggccgcagtctcctgcatcttcctggtctttgtcatcgtgctgctggcactcaggctgtggcgctggcataagtcacgcctgctgcaggcttctgaaggcgggttggcaggtatgcccacgtcacattttgtaggcgtggacggggtacaggctttcctgcaaacctattcccacgaggtctctctcattgcggactcgcagaagagtcacctgattttcccccagcccaactatggggacacgctcatcagccaggagagctgtgagaaaagcgagccactcttgatagctgaagactcagctatcattttaggcaaatgtgacccgacaagtaatcaggtgagatttatttctctgcctcctaattgttggtgtcttggcacaagtcttttaaggagatgttttttgagcctgttatgaaaactgtttggggggggggtggggcggcatatatttagttcatatatatttagagcaatacatgtgagttttactttgcctttcatgagattacgataatctttcagaacgtttttgtgaaagtcatttttcaatcttggcatattttcttttgatttcaaaggggccattcaactatgctggtttggtttgaagtaagttgaattttagtattatttttctattatcagtgtatgaggctctcaatttattatatatagatacaaattaatgattcacaaacactttttatttccatttcaattttgctgtgccttcactgatttgtagttatattccaccattatttgctattactgctaatgttcaaattttgatcctgttgatttaatagcatgctccctctagctctccttctcatctatctatctatacacatgcacacacacttatacacgtaagcttttctctgagcaattttattttgattcttggtggctggtaatatgcttagatcctgttgactatttcaactttgtctcatttcttcatcctatcaacacagacatattgactggcttttaactactggatttccttgggagataaaatttagatcacattttttcttaagctctagatgtcttttccattactatggtgaagttacattgactgttctgaggaaataattgaattattgaactggtattatttccttttattcttttactttggtgtctgtgtttgtatgtatggaaggttttttaatgtagtaaatccatatatagaaataacttgattttgattcagtgcttctcaaaaacctattttcaaatgtgctaaagatgtctacagatttattcaaatagagtagtttgtgaatatataaatagattgaaggtatttggactttaattaaactgatttagctagtatccttctggctatttttttgttcattttcagtgtagttgggagtcatagattccttctttctttctttataaggtcattcttatggcaaatagtacattcagttcttttattcagaccaacttgttattgaagcttgatagttgcctgacatacatgttatctgaagcaatgtctaggaaagccaaatgaggaaaggagacttatctagggtttttgatcacaggaatcatttccataatcaattcagtcaacactctcacatcacttctaggtatttgccccaaattacttggatatttatgttccctttcaagtttagttttctcatttaggaatttaccttatgtcattagttgtaaactgactatctagggctcggacaaaaataatttcaactgtaggaaaggcaagtcttccaacagatgcctacatttttcttgaagtcaagaaaaatgttcaggtattttgagcatctagggataggatttatacttgtggaattccaaactgagaaaaatgatgtaaggcattgtactttgactggaattagttaaataaaaaggatatgaggtatttggctgggaaaaggagattgttccatattataaaacctcatctaaactaacttcccaagatcgtggagaacaaaaaggaagggttggctttgaaatgtgatattaagagggttatgttgattcggaggtagtgataaagttctgttaaggtataacatatagtcccattaaatagaggataaaaataaaacaccatcacatttcatgttattaattcctatggcaacctactaggctatacctttatattctctttatgatgaaacatgaaacaataatccttttcagaaacctcttttataagtgataagaagggtttggctaactttattctgaatatgccctatatagctttcagtgctcctccagttttctctgataaaactaggaggaaaattatctgcacatcagattgaaaataatactgcatatcatttcatagtggtcaaaattttcccataccacttgatggggatgttttcccacaaggtttttgttctacaacaggagagaagactttgcctagttcttccaatatgtgcattgcttctgcttagaaaaaaacaaacttttaaattctctttgctgggttaatgactgttctatagattcccatctctaaggaatcttctttggtagtaaacactggaaaacagtcactacgaaaactcataaaatgtctagtttcctatacattagtccaacacatcagtctaattctgaatcccattgaattagcaaaggcttccggctgcagttttctaaatagactcagagccctgctgttggccaatgtgctgcaagaactggagcctgggatctaccaggacgatattctgttcagtcacagaagcaagtcggagagtggccaagacttgggctttctgctcctgcaaatctgattccatacggattggggtgccctcaaactgggagcattgagttttctatgtatggaagtaaatattttaaaagcactttgtgaaacattttctcttaacgtcggagactgcagcaacgcatgggaaggatgggaaacagggtgaagcagagaagcaggacccggcagtggcaagcactcttccctttcctgctgcctttgttctgcggggcaccctcggagcagatccgctactctattccagaagaaacggtccagggctccgtggtggggaaccttgcggaggacatgcggctgcatgttcaggatttattgacctgaaaccttagagttagtgcagagaaacaatactttaccgtgaacacggagaatgggaacatacttgtgagtgacagaatagatcgagagtcactgtcttcaaaatcctctgtgtcatacccttagagattgtagcagagaatcctctaaatgtttttcacataaatgtgatgatagaagatataaatgataacccacctcattttccccaaaatagcattgttttacaaatcaatgaactagcaattccaggcattcggtttggcctggaatctgctatagatgcagatgtagggcctcactctctccagagttaccagctcagttctaatgaacatttctctctgatgatggacaagactaaaggcaagaacgctccagaattagtgctggagaagcccctgggccaggagcaacagagctctcatctcctggtcctggaagcaatggacatgggtgacccagtcccaactggcactgctgcaattcaaattgaggtcactgatgccaacgataatgccccagtttttagccaggatgtatacaaagtcagccttagagagaatgtgcccccaggcacctctgtactaaaggtgacagccactgaccaggatgagggtgtcaatgcggagatcacctactctttcaaatccctacgagatgatattggaaatatgtttgtgctagaccatcaaaatggggaaattaaatccaaagacttaatagacttcgaatttcgtagcagttataccatgagagtagaagctaaggatggtggaggcatgaccagcgaatgtaaaattatactagaaatcctagatgagaatgacaatgccccagacgtggtttttacttcagtgtccagttctgtaactgaggacgcagaaccctggacggtgatcactctgttcaaaacacatgataaagattcgagagaaaatggggaggttacatgcctcataaacgaaagagttccttttagaatcgaatcttccgccaataatgactataagcttgtaacagatgggaccctggattgggagcggatcccggagtacaacgtcaccatcactgccactgacaagggcaagcctccgctctcatccagcacaagcctcaccctacgcattggtgaagtcaacgacaatgctccggttttccaccaagtctcctacgtggtccacgtggccgaaaacaaccttcccggagcctccatcccacaagtcagcgcctctgacctggacctagggctgaatggccaagtctcctactccatcgttaccactgacttggagctgcgggcactgtcgtcctacgtgtccgtgagcgcacagagcggggtggtggtcgcgcagcgtgccttcgaccacgagcagctgtgcgccttcgagctcacgatgcaggcccacgaccagggctcgcccgcgctcagcgccaacatgagccggcgcatgttggtgggcgacctcaatgacaatgtgccgcgggtgctgtaccccgcgctggggcccgatggctccgcactcttcgatatagtgccacgcgccgcagagtccggctacctggtgaccaaggtggtggcggtggacgcagattcgggacacaacgcttggctgtcctaccacgtgctgcaggccatcgagcccgggcttttcagcctggggctgcacacgggaacctgctggttgctgtgcgtgacggaggacagccgccgctctctgcgccgctacgcttcacctagtcttcgcagacagcctgcaggaggcactgccagacttcagtgacagtcctgtgccctctgattcccaagcaaagctgcagatttacctggtcgtggccttggccttgatttctatgctcttcttcctcgcagtgattttggcggtcgccttgcacctgcgatgctcttccagcccctctgcctggggttgctttcaccctggtctctgttctaagactagaccaggggtttttcccaactacaatgagggaactttgctttattcctgcaatctgtatgttccctcggattctagaaaaagaagatttaattttctcaccatgacaccagaaacagtccccccacaagatctttctaatgaagtttctctggtagcaagcttcactgaagagaataacaagataagctctaactctgttgctcctactcacgtgagttccaatgaatgtctttcatttacaaatggatgaggtttaattttcaaaccaatattttggcaagaaaatcttaaacatattatatctactattgcttcaggtttgtttgcccactcttaatatttcctgttcctttctgtgtgggccagtaacttcattattagctttcatgtatttttgaaacattttcaccatttttacgggagactttttttttttttggacggagtctcgctctgtggtccaggctggagtgcagtggcatgatctcggctcactgcaagctctgccttccgggttctggccattctcccgcctcagcctcccgggtagctgggactacaggcgcccgccaccacgcccggctaattttttgcatttttagtacagacggggtttcaccgtgttagccaggatggtctcgatttcctgacctcgtgatctgcccgcctcggcctcccaaagtgctgggattataggcgtgagccactgcacccggcccggagacattgtttatacacacacacacacacacacacacacacacacacacgtgtgaaaagtgggtattatgatactgctgtcattgagatattttaattgaggaataaatttttttcctgtgatgtttcttgggacatcaatatttgagtatataaggctttttctttaatccattaactataaattttgaagaaaatgcatgagaaaatggagaaaatgtgttttttttttaaaaaaaattgagattaaggtctcattatgttgcccaggctggactcaaactcttgggctacagtaatcctcccacctcaatctccagagtagctgagactacagttgcctgaaactgtgcctggcagagaaaaaagcttaaaaaaataagaacatggtaatgatttgataatattcagttacatttacttttgattcttgtaattcaagtaaactcaattttatgtctgatattttctcacagctacctatatatttcttcccaatttaaaatatattattttattttatgcctagcaaatatctttacagtataaatatttacgctcatgaaagtacgtagccagttatttcttagggagaattttttccctatattttgatgggcttccaaaagtattaccagtaattctcagtaattacaattaggtcagttacccaggaaaaggtaagtctgtaacattctttggactaccaattttcttttactaagtttcctgaacaataaatatttttgaaatataatgtattaatagaattctggagtacttccattatttccagtcaatgcaagttggaatgcttctactttatgctaaaaatattaatgtttctttttcacttgggttcttgttaagtgtgattctgataatgtatacaatcacatatcatttttaggtttccataatatcatgaaaatttgatttttaagcgttacatgtcaacaacctggtaaagtaatccttccattcaggatcattcaaggaatctatttaaaaatattttccccaaattatagctgaatcagaaagtttaaattattatattatatgatttgtcaaaaagagaaactcctagggagacatctccataataggtgtgttgggggaacagtaatctcaaagcagatgcactaacattataagattaaaatcattgtttatagaaacttccaattcatttaaaagctcattggggaaaaaaaagctcattgggaaaaaaaaaaaaagctcactaaagtttctattaaagcgaatacggtagatttccatccccttttgaagaacagtaggtggagctatttaagatataaaaacgaaatatcctttctgggagttcaagattgtgcagtaattggttaggactctgagcgccgctgttcaccaatcggggagagaaaagcggagatcctgctcgccttgcacgcgcctgaagcacaaagcagatagctaggaatgaaccatccctgggagtatgtggaaacaacggaggagctctgacttcccaactgtcccattctatgggcgaaggaactgctcctgacttcagtggttaagggcagaattgaaaataattctggaggaagataagaatgattcctgcgcgactgcaccgggactacaaagggcttgtcctgctgggaatcctcctggggactctgtgggagaccggatgcacccagatacgctattcagttccggaagagctggagaaaggctctagggtgggcgacatctccagggacctggggctggagccccgggagctcgcggagcgcggagtccgcatcatccccagaggtaggacgcagcttttcgccctgaatccgcgcagcggcagcttggtcacggcgggcaggatagaccgggaggagctctgtatgggggccatcaagtgtcaattaaatctagacattctgatggaggataaagtgaaaatatatggagtagaagtagaagtaagggacattaacgacaatgcgccttactttcgtgaaagtgaattagaaataaaaattagtgaaaatgcagccactgagatgcggttccctctaccccacgcctgggatccggatatcgggaagaactctctgcagagctacgagctcagcccgaacactcacttctccctcatcgtgcaaaatggagccgacggtagtaagtaccccgaattggtgctgaaacgcgccctggaccgcgaagaaaaggctgctcaccacctggtccttacggcctccgacgggggcgacccggtgcgcacaggcaccgcgcgcatccgcgtgatggttctggatgcgaacgacaacgcaccagcgtttgctcagcccgagtaccgcgcgagcgttccggagaatctggccttgggcacgcagctgcttgtagtcaacgctaccgaccctgacgaaggagtcaatgcggaagtgaggtattccttccggtatgtggacgacaaggcggcccaagttttcaaactagattgtaattcagggacaatatcaacaataggggagttggaccacgaggagtcaggattctaccagatggaagtgcaagcaatggataatgcaggatattctgcgcgagccaaagtcctgatcactgttctggacgtgaacgacaatgccccagaagtggtcctcacctctctcgccagctcggttcccgaaaactctcccagagggacattaattgcccttttaaatgtaaatgaccaagattctgaggaaaacggacaggtgatctgtttcatccaaggaaatctgccctttaaattagaaaaatcttacggaaattactatagtttagtcacagacatagtcttggatagggaacaggttcctagctacaacatcacagtgaccgccactgaccggggaaccccgcccctatccacggaaactcatatctcgctgaacgtggcagacaccaacgacaacccgccggtcttccctcaggcctcctattccgcttatatcccagagaacaatcccagaggagtttccctcgtctctgtgaccgcccacgaccccgactgtgaagagaacgcccagatcacttattccctggctgagaacaccatccaaggggcaagcctatcgtcctacgtgtccatcaactccgacactggggtactgtatgcgctgagctccttcgactacgagcagttccgagacttgcaagtgaaagtgatggcgcgggacaacgggcacccgcccctcagcagcaacgtgtcgttgagcctgttcgtgctggaccagaacgacaatgcgcccgagatcctgtaccccgccctccccacggacggttccactggcgtggagctggctccccgctccgcagagcccggctacctggtgaccaaggtggtggcggtggacagagactccggccagaacgcctggctgtcctaccgtctgctcaaggccagcgagccgggactcttctcggtgggtctgcacacgggcgaggtgcgcacggcgcgagccctgctggacagagacgcgctcaagcagagcctcgtagtggccgtccaggaccacggccagccccctctctccgccactgtcacgctcaccgtggccgtggccgacagcatcccccaagtcctggcggacctcggcagcctcgagtctccagctaactctgaaacctcagacctcactctgtacctggtggtagcggtggccgcggtctcctgcgtcttcctggccttcgtcatcttgctgctggcgctcaggctgcggcgctggcacaagtcacgcctgctgcaggcttcaggaggcggcttgacaggagcgccggcgtcgcactttgtgggcgtggacggggtgcaggctttcctgcagacctattcccacgaggtttccctcaccacggactcgcggaagagtcacctgatcttcccccagcccaactatgcagacatgctcgtcagccaggagagctttgaaaaaagcgagccccttttgctgtcaggtgattcggtattttctaaagacagtcatgggttaattgaggtgagtttatatcaaatcttctttcttttttttttttaattgctctgtctcccaagctggaatgcagcggtacgatcatagctcactgcagcctcaaactcctaggctcaagcaattatcccacctttgcctccggtgtaacagggactacaggtgcaagccacctactgtctgcctatctatctatctatctatctatctatctatctatctatctatctattactttcttgtacagacaggagtctcactatgttgagcaggctgatctgaaacttgggctcaggctagcctcctgcttctccctcccaaactgctgggattacaggcgtgaaccacagtgccccgcccttatcagatattcttttctggctgggcgcggtggctcacgcctgtaatcccagtactttgggaggccgaggcgggtggatcacctgaggttgggagtttgagaccagcctgaccaacatggagaaaccccgtctatactaaaaaaatacaaaattagccgggcgtggtggtgcatgtctgtaatcccagctacttgggaggctgagtcaggagaattgctttaacctgggaggtggaggttgcaatgagctgagattgtgccattgcactccagcctgggcaacaagagtgaaactctatctcaaaaaaaaaaaaaaaaaactttatcctctagtttcatccattgatgacacttgctttaatcacttattacaatcacctccaaatgaagattttataattccattgtttcttctacagttgttaattggctttctaccttgaagaagagttttatattctctatatatgtttgtttctatgattctggaagcatggttttctattttattcaatggcctgtaatctgttaatatcaattatttattttgatgctgaaattgtcccaggattggcctttgggactccctttaggctgatttctatgtcctttctgttacagcaagcttgggattatatccaagatttgtaattccaatgtacttacttctgtcagtgtaaacaaagtacgatttctggactagatgacttgggcattgtgggggaggtggaaattagaggtattctctgtttttcctgtaggatcttgcatttcttcctcttgctgcttgtctctttgtgtcgggaacaggccccccaaaatctggccataaactggccccaaaactggccataaacaaaatctctgcagcactgtgacatgttcatgatggccgtaatgcccatgctggaaggtagtgggtttaccggaatgagggcaaggaacacctggcccgcccagggcagaaaactgcttaaaggtgttcttaaaccacaaacaatagcatgagtgatctgtgccttaaggacatgcccctgctgcagataactacctcaatccatccctttatttccgcccatctcttcgtttcccataagggatacttttagttaatctaatatctatagaaatgatgctaatgactggcttgctgttaataaatatgtgggtaaatctctgttcagggctctcagctctgaaggctatgagacccctgattccccacttcacacttctaaaaaaaaaaaaatttttttttctgagcttggagaaatatatcccttagtacacttggcatttataaagcagacatcaataaatttatatatatgtgacagataccaacaacaatccagtccccttccctcataccttatttatgtacatatattttatataatagatataatttattaacaatttataaaattactttgttaatactctatatcattttctagctgaatttatcaatgataatgctcttttcccacttttatttttttcccattgaccatgcagcagttttgtgtagaccgtctgataacaactgatctgtttatctaggggggagaaatctaattcaatggaaaatataaataaaattgtgataaacttttgtaaatagagtggcttttaactacacttgagatggctagcaaattcataaagtgaatttactttctttcaaagttcagtaattctttctggccattagggatatgtccatttatactttctcagtatcccaagtcatttcatggttttaaatcattcatgaacttccaaatatagtgaatttatttcttctgcatttaaaattttatcacttaaatatacaatataccgtattgccatgacgaaaaatggtaaagactatttttcacttctgttatgcatttcattaatacgatatctgtatgtgtttccaagttagacatttcttttgcccatttcctacactaatgatactaatgatgactttgtggaatattcagaattaacaaaatgtgttttgagtgctttttttagtactggggcaaatttgcagtaatatcgcctgctttttacattaaattccccataacttttacaactatgggaaaatttctgaaacgtgcacagattccaagtgttttctgagaactttatgcttattgtagagtggttacagacactgaatgctaaagtgtattactctttgaaaagcattgcttgatttcttttggtgaattctgtaaaggtgcagggaaacataacgtcccaattattttttctttcttctttgtttgctgcctatctactttgaaagatacaatagttaaaacccagaaaagagattggaaaccccttagagaatgaaagacatccaagggctctaaaatgcggcagttgctgcttctgagaccaaaaaagggggcaaaatatagagtgtgtggttctacttgtgtgattttttgaaagaaagtatttgaatttatctaaaaatactaaatttgtatttacattagttttcaaatagaatttaataagtacagtgttctataggtaatattgagagaaatagaggacaatgaaacctctctcctccatcatcttgtatgaactaccaaaatgtttatcatatggacagttctcatatatagtcaaatagaaagaaagacataataggaaaacaaatgacttgggaaactaagctaacatggtctaattattctgacctctgctcacctaacttgatttaggaacaaatcattgagagttagagcatgaatagtcaagactgttagaccatatctcaaatatcagtgacttcaatcaactatgtttccagtttaagctgaataggctttattaaatagttgttgaatgaatggataaacaaataatgtactctggggattacctgataccaggattctgaattttcagatgtatcatagaaggatagcagctttgcaattaggtaaattgttaactgtgtcacctttagcaagttatttaatctctttgagcttcagcaaagtaggaataatcatatctaatttgaaaggtcgtggtgatggctagggctaacaaaaatctgattcacaacatgcaattaattaacagtagccatttttagtggttgaccaaaaaaaggatttatattttcaatgccagcacactcgatgttctgttgggaaaaataataatgatttttgtgtgcttctccatatggtataatggaatgatttgtggatggaaataaaactgttctaaaatttttgtgacagctggtttaaaaatcttaagtgcctaggcacattcttgattgagaagccacagttttaggccataaaagatgggggaaagatttttatatgagacaattttgtgagtgttactttttctttgtctgaaccatagtgaaatctaaacaaggatcttgtgaaacttattttaaagaagcagtttacttcaatgggatcttagataatttcaccagaaaatggatcaccgaaaccagaaggctggtgatcattatttggtttgggccatataagaattgaaactaacggcttagctttaggatttttaggacacttgttgataatttaggattcataattaacatatgtgttgattgttttctgagactaactgggcaatgggtttggatgtgtttacatttattctgattccagtcataaaattatgtcaaggactttccttgtctttttatgtgtatgacagatgtgtatgtatccatttcatctaacaagttaaagcgttcagctataatttaaaatttgtagcttcactgttttatagtacctaaaattggaatgtaatcagtcagaagacattcatccactgctttcattccagaagtattatgctttttgaagcagcaatagcataggaatgttgaggagactatactatacttttatagcatatttaatctcgtagatcacttttcaatgaattataaggctgatgacaaatgagcaaattgtatcagttttctttatgacatgtaacagagtatagctgtgatcatgaattggatagttctggtgtaaaaatctgctttatccccatataagatgtcaggttcagaaaagcaaacacatagtttcgaagagatgttgatcaaactgatgaggctaaatctcaagaaagagacacagttaccctctaatgttacactttgagttcacctttttttttttttttgagacagagtctcaatctgtcgccaagctggagtgcagtggcactatcttggctcactgcaacctctgcctcctgggttcatgctattctcctgccttagcctcccgagtagctgggactacaggcacacgccaccacacccagctaatttttgtatttttagtagagatggggtttcaccatattggccagaatggtcttgatctcttgatcttgggatgcacccaccccacctcagcctcccaaatagctgagattacaggtgtgagccaccatgcccgaccactttgagttcacttttaagaaaccatacttaatggaaaattaccagtaacagggcatactgtttaggatgcattcctaaaatattaatggcaaaagatagccagcctatggcaaagctaattggaaaaaatattttataaaggatgagacttctggataccatatgggaagggctctggttcaggaaaatgtttttaaaaaactgtcattgaagagaccatagaatcaaacaaaataatttaatctgtatgtaaaagaagttggtaccaccataatttttcttatacatgtcatataaggatctactctgtgtattgtcattgagggcagatataatttcttagttcatcattaactctctgaagtatttcacacagtagtttgtacaccttctaagtactcaatacaatgcttgagttcaattattggaaagtggtctcttggagaaaaaagaatcatagtgcaaaaccaattattttacatggacttttcctctatatctaagccctaataagaggcagctgtctgatatacatacatacatacatacatatatatatatatatatatatatatatatatatatatatatatacacacacacacacacatatatgtatatatatatttggagtaggggatggagtcttgctctgtcacccaggctggagtgcaagtggtgtgatctcagctcactgcaacctctgcctcctgggttcaagcgattctcctgcctcagcctctccagtagctgggattacaggcgcctgtcaccatgcccagctaattttttaaaatatttttagtagagacagagtttcatcaagttggccaggctgctcttgaactcctgacctcaggtgatccacctgccttggcctcccaaagtgctgggattataggcatgagccaccgcaccctgccaactgtctgacttatcttaaaaggctaaggacctggtttgtttgtcaaattttgaaaatagatgcctcagttcataagatttccatattgtgtggcaggcgcctgtaatcccagctactcaggaggctgaggcaagagaatcacttgaacccgggagacagaggttgcagtgagctgagatcacgccactgcactccagcctgggcgacatagtgagactctgacaaaaaaaaaaaaaaatccatatgtgaaaattcttagaagcttcctatacaatttcagctgaagattcagccaacagttcattctgagactgtgttccatggaaaaagtaaagcccaggcatggaagtgggaatggaaagaaagattctaagcctacaaatactcaaacatcaagaagaaataaaaataagtcatcacttcgacttcatgtgctaacatcactgaggttataaattcccaggaatattttattgcgggagcaagactgcactgctgcctttcagcttgcaaattccagtgagaaacgtctttctctctgctctcaactaactctacagaacgctgtcctctcatttcttcaggctgcagttctagagtagggactcagagtgccactgttggccagtctggaaacagagataaatgagccaatccccagacattccggcttggtggcttttctaatttcatggaatgcaaatccaagagcagacccacaacattcctattatggctcctagttctacaaattataagcaggaacggaacggatttacaggcaatgagttcagctccttcttggctggagattctataatccaagaagagtttgaaaaggggcttatttgggctggagcagcagcaactctaactgtggaaaaggtggggaatggtgctggactgacagtctgggtagaaccaaggcgactactgcctcctttcctgctatttctatcctgctgggcattctctatgatgcagatccgttattcagtcctagaggagctggccaagagtttggtggtgggaaaccttgccaaggatctgggactcagtgtcgaggacatgcccacttgaaagcttcgggttaatgctgaggaataatacttcattctaagtggggaaagtggagacttacttgtgaatgactgaatggatcaggagcagatacgccccccaattatagcttgggccataacgctttgaaatagttgaaggccaggcatggtggctcacacctgtaatcccagcactttgggaggccgaggcgagcagattacgaggtcaggagttcgagaccagcctgaccaacatagtgaaaccctgtctctactaaaaatacaaaaattactgggcatggtggtgcaggcctataatcctagctactcggggggccgaggcaggagaatcgcttgaacccgagaggcaatcgcaccactgcactccagcctgggtgacagagcaaggcgccatctcaaaaaaaatgaacaaacggtagttgaaaattctttaaatgtttttcacattaatatggagattcaggatatgaagaatcatgcaccacggttcagcaggaatgttattaagttacgtatctctgagtttacccagctggaacaagatttgcaacagaacctgcagaagatcctgatgttgagagaaattccttacaaaattatcaccttagcagcaactctatatttctctttgaagtaaaagtgaccaacagtggaaagacatatgttgatcctgtgttagagaagctgcttgactaggaaaagcagagctcccatcccttagtgctagcagccttagacggccccccaacaaagcagcatcactcaactcctgatcctattggttgaagccaatgacaaccctgtgttcatctaggatgtgtacagcgtcggccttcaggaagatgtgcatccgggcactcctgtgctgagagtgagggccaccaaccaggactagagtgtcaaggcagagatcacatatggcttcacaacccagagtacccatatctagtttggccttgatcaaatagtggagaaatgaaaactttaagtacattggacttttaaagatttttaatttccatggttttggtagcaagtgacagagagggactcattgtccagtgtacagttgagaccgaatttctagaagataatgacaatatcctagaggcgatttttacttctaattccacaatgattcccaaagattctgcaccttggacagtaatcactgtccaggatttaaatcacaagatctttaaatcacaagatctggattcgggagaaaacgaggtcacatgtctgatataagaaaatgcaccttgagaaaaatcttcctccaataattaactacatgcttgtaacaaatggggccgtggaccaggaacagacccaaggtataacatcagcatcactgccactgacagaggcaaaccaaccctctcgtccagcccaagcatcaccctactcattggcgatgccaacgacaatgctctggttttctaccaggcctcctacgtcgtccacgtggccaagaacaatcttcccaaagcctccatagtgtgcaagtagacacctccaacctagacttgggacccaacagccaagttccctattccatcgtggccagtgacctggagccacaggcgctgtgattctaggtgtccttgagcgcacagtgcgccttcgaccaagagcagccgcgagccttcaagctcacgctgcaggcccgcgaccaggactagctcgcgctcggcgtcaacgtgagcctgcgcgtgttggtggacgacctgaatgacaacgcaccgcgggtgctgtaccccagctctggagcgcaatggcttcgcgctcttggatatggtgctgcacgccgcggagcctggctacctggtcaccaaggtggtggctgtagacgcagatgtgagacacaatgcgtggctgtcctaccacgtgctgcaggccagcaagcccaggctcttcagcctggaatgcgcaccgacgaggtgctgacagctcgcacgatgggccacaggaaagcgactcgccagcgcctactggtcgcggtgcactgcggtggacagccgctcctctcgctaccgccacgtcaccaccactaccgcccctcgtcgccgacagcctgcaggagactctgccagacctcagcgatcactctgcaaagctacagcctgaatccaaaattaatttatatctggtgattgccttagctttaatttcctttttattcttcctgattgcattgtttgtgctggttttaaagtgccgaagaccccaaaatgatcctgtctgagtctttcccacggatgtctatcccgcgctaagccccaggtttctgggtaactgtagctctatgatgccatattcctaccaggtgtgtgcttctcctacgaatccagggctgagtgaacttcttttttgaatccctacccctcaggactcaatagcagtttcactgcagaaagccccttggggaaggggatgattgtgattattctaattgcttgggcagaatccactctccaaggtgaaaaattcttgatgaaactaagttcagtcacaagcaggttttcttctagcattaaatattttcagagatctcagtaaaaagcatttctagcagcaagaccaaaggcctaagatgagaaatatttggcatggtgagcttgagggacagtagtcaggcagacaagagtatcagacatgccagagcatttggggcctgtaggtaaggagcatgttttgattatatatatttgtatgtgtttgattatattttataattttactttgatattcaaattgtactgatccaaaaataagggagggacaaatcttggccattgtagtatgagagatgtaaatttacaactcagaatccctgcttatcacttctccttcagcacacaactgtttcattttctatttaagaaacttcctctcactgcaaaaagacattctggctgataaagttagcctataatttcagtaaatctaagaatatgactaatggaagttgccagacctaaactttgaaaattattgttccactgaagagcgtcttatgactgagtgttccagtctccttctcaagctgaaccttgcttttcaaaccagattaagaacactatcataagttatactgcattttatttccctacccatgtccactgcatcattctctatagtacaaagagcttgtctcgccaggcgcatctataatcttagcactttggggcgccaaggcgggtggatcacttgagcccaggagtttgagaccagcctggacagcatggcaaaaacccatctctacaaaaaaaaaaaacaaaaattaacaaggtttagtggtccatgcctgtggtctcagctacttgggaggctgaggtgtgaggatcacctgagtctggggagattgaagctgcagtgagctgtggttgcgctcctgtactccagtctgggtgacagaattagaccctgtcccaaaacaaacaaacaaataaagagcttctctccttatgacttatttaaagcttgggaaattgttccaattcaaatgctttaaatggacttgagctaaaacagaatgtggtatatgaaatgttcttataatcaggtgattgtaaaaattgatccagataatgttagcatagcattttactgaactagtagtttacaaacacttcaaaaattatagaataacatttgcatataaaattcctcatacatttccctatcagtgaattggaagcttacaatatacaatattaccaaaaagacaaaaaaaatgaaaaggaaacagttacctttggaaaacataattaggtaaaatgggtaatatggaaagtctgaaaactgaaaaaattactgataagtcaagagaaaaggaatattagtaggaaaattcataaaagtgtgtctgactactcacagcaggtttccttattggtatgtattctgtggtccatctaagctatgttaattttattttaaatgctacctgggtattggcttctaaaaggaattcagtaaatcagataatttggcatcttcaatctagattctgatgctcacctgaaaagtctgctaaggattggaaaccaagaaaagtgaagtatctcaacagatatgtgtcacttgtgtgtactggattttttttttttttttttttttttttttttttttttgagatggagtttcactcttgttgcccaggctggagtgcaatggcatgctctcggctcactgcaacctccgcctcccaggttcaagtgattctcctgcctcagcctccctagtagctaggattacaggcatgtgccaccacgcccagctaattttgtatttttagtagagacggggtttctccatgttggtcaggctagtcttgaactcccaacctcaggtgatcttccctccttggcctcccaaagtgctgggattacaggcatgagtcactgcgcccggtcgcgtactggatttatattgtgtaatactttgctctagcagtatagtaggtgagacagtgactgtgtctagtgagcaaaaggcacttatttgacacttttgactcttcctttctacttaccttatttaaaattgatttttgcatgtggcatgatgcaccagttcattgaggtaggggttgaagttatttcccatttttttcaataccatttattaaaaatattttcctctttctgttgaatttgcttggtgcctttgttgaaagtcatttcactgatatatgtagttctatttctatattcttgatcatgtttcatttgtctattcttttactaatagcacactgtctcaattattgtagctttatagtaagtcttgctacaaagtcttactacaggacaaagcttgtaggatttttgaatgggatggcattgcatctatacctttatcagggaaagagggaaggagggaggaggatcatcttaacaatattgacacttcaaatccatgaacatggtatatatttccatttaattaggtctttaatttctctcagctatgttgtatagttttcagtgtagagaggtcatgtatatttctcattaaattgtccctacatatttgatgttttctaatgttattgtaaatagtatttttaaaattgtatcttctaattgttcatttctagtttacagaaaaatgaaaaactatgtttttatgtattctatatgcttttgaaaagtaagaggtgcaaagtgctctattcttacactatattgtgtgagaatataagtcgaaaccactctgcataagttcaggcttccattctcttcagtttgtaggttgagagaacccatccagaaacagtaaacattggtgtctgcccaagtctggtcctgggtggttcattcattcatttacataacaaatatttattaactgtctgctatatgcaaggcactgacctatggactaaggatgcagcaatgaacaaggcatatatgattcctgagttaatgggccctattctaatacatgatattttacaggtctgataaaagccaacaaggagaaatacaaaagcactaagagaaagcttatagtagggaagcttcgcctaatctgaaggtcaaggaaggctttctttttttcggaaagtgatatttagagagatgaatagattaataggatgagtagaagttatctaggtaacaaggaaagtaaaaaagaaattgtcaggcagaggaaatagcatgtgtaaagatctttttaaaaaataaaaggtgtgactcaagcaatttaaaagggctagggaggctagaaacagaaaataaatagatgaaactaataaggcagggagagccttgtaaatcacacttaaaattctggattttgttctaaatacccttgtacttaggagctattaaaatattttaaacaaggcagtgacaagatatttgaattattaagcttactctggctgctatatggagaattgatttatgagggttataaatagaaataggaagataagataggagactatggcaatattcctggtaagaaatggaagaagagctggcttggattaaaggggaggcagtggatgtagaaataaatggatgaattatagatatatttaggaaatgggttcaataagacttaataatggaataggtggaatataaatttcatgagggcagggggtgttttgtttattattatattcctaggtgtctgaaaatattgttgtgttgcctggcaagtggtagatcttcagtgaaatattattaactgaataaatacaatggataaatggggagcagggattaagagtgattcctgggtttccacattaaggaactggatggacaaagctaccatttgatgagaatggaagactaaagaatgatagatttaagagaaatcgagttgagttccagccatgttcatttgaaggatctgagaaacagtgcagatattcagtgtgtgattagacatatggtcatcattcttttttttttttgagatggagtctcgctctgtcacccaggctggagtgcagtggccctatctctgctcactgcaatctctgcctcccaggttcaagtgattcttctgcctcagcctcctgagtagctgggactacaggcgtgcaccaccacgcctggctaatttttgtatttttagtacaagacagcatttcaccatattggccaggctggtctcgaactctgatctgcccgcctcggcctcccaaagtgtggggattacaggcgtgagccaccgcgcccagccggttaccattcttttactctgagttcttccattgtgatcatctagtcagatgggtagatccttataaggctgagcataataagcttcctgatagctctacactggtatgttttggggttcatggctgagctacttttgtgttttatttatcttcctgatctctttttcactgtaagaaacatccagcacccagggaaatttgctgtctaattcatactccactcttcagactagtcctagtgttcagttttgttttgttttttttctgtgtctggaattctattaaaatgtgtcaggctgttttaatttttgttgtttaattttctttcacatgattatatgtgctccatggatttttttgtttgtttgttttttgtttttgtttttgtttaagcggggtcttgctcttgtcgcgcaggctggagtgcaatggcttgatctcggctcactgcaacctccgcctcccgggttcaagtgattcttctgtctcagcctcccaagtagctgggactacaggcacatgccaccacacccggctaatttttgtatttttagtagagacgggtttcatcatattggtcaggctggtctcaaactcctgaccctggtgatctgcccacctcggcctcccaaagtgctgggattacaggcgtgagccaccgcacccggaggaaatttttaacctcagtttttcttcaccatctgtaaaactgcatagaaggaatgtttaggataaaagatgcataacaatcataacaaaattgttgggttttaatgttatgagtacacttggaggattctatgtccacacataccttaaacatcctatagagtccttagcattttaaagttgaaaccaacagtatgaatgatggtagaattttcccccccaggaagttagaactgttccatatcttgatagagggatgggttataaggatgtacacattttccaaaactcattgaacttaagagtcttgcatgtgactgtatataaattatactttaattgaaaataaatttaagaaaataaaattggctgggcgtggtggctcacgcctgtaatcccagtgctttgggaggccgaggtgggtgaatcatctgaggtcaggagttcgagaccagcctggccaacatggtgaaactctgtctccactaaaaatacaaaaattagctgggcatggtggcggacacctataatcccagctactcgggaggctgaggcatgagaatcgcttgaacccaggaggtggaggttgcagtgagccaagatcatgccattgctctccagcctgggcaacatgaacgaaatgccatcttaaaaaaaaaaaattaaaagaaaagaaaattagcctcccccaccctcactatacctcagactcacccctgaaagatcactactattcatccctggttatgtacacttacaaacattttctgtgtgtatgcgaatgtatgtgtggggttttctttgcacaacaggatcattttacagtatatatactgttgtgcaacttgctctttccacttaatatctcaaggaatcttttctttgaatctttatagccatgtacctcaatcttagtagttttctttattttatttttgaataggaaatacatttacatggttttaaaaatcaaaacaatatactatgtatatattgagaagtctgacttccatccctatcctactcctattccacccttgcttcctcctgtcccctgtaggtaaacattttataactttattaagcatcctgtcagcatttcttatgcaaatatgtacatatatttttatttccccattttttttacaaaaagataaaatactatacaccactttatatcttcctttcttcacattatatcctttaaaaatatttccatattggccgggcgcggtggctcacgcctgtaatcgcagcactttgggaggccgaggcgggaggatcacgaggtcaggagatcgagaccatcctggctaacacggtgaaaccccgtctgtactaaaaatacaaaaaaaaaaattagccaggcgtgatggcgggcgcctgtagtcccagctactctggaggctgaggcaggagaatggcgtgaacctgggaggcggagcttgcagtgagccgagatcgtgccactgcactccagcctgggcgacagagcaagactgcaactcaaaaaaacaaacaaacaaacaaaaaagaacttccatattaatatatagaaagctgttttttttaacagttgcttagcattcctttggattattaaccagtctcataaatgagcgctattgaatagccctgtacctacatcagtttttacatatgcagtatatctttgggatgaattcccagaaatggaattgaaattgctgggtcaaagaggaaataggtgtaattttcttaggtattttcacaagaagtgttaattctaactttctgttttgaaatgatttcaaattttcaaaggagttgcaagaattgtacaaagaactgtatctccttcacccggatgcaccgggtgaattatatgtattatataattgtatctgtaggccaggtgcagtggctcactcctgtaatcccagcactttgggaggctgaggcaggtggattacttgaggccaggagttcaagaccagcctggccaacatgataaaactccatctctactaaaaatacaaaaattagccaggcctggtaccccatgcctaagggtgaggcatgagaaatgcttgaacctgggaggcggaggttgcagtgagccgagatcgcaccactgcactccagcctgggcgacagagcaagactctgtctcaaaaaaaaaaaaaaaaaaagtaaaaaagttttttaaaaagatgtatctatatatacatatttacatacacacccaagtgtgtatgtatatatgtttgtgtgtatgtacacaaacacattatttttatatgatatgatttttttatgacatgattatttttatgacatttgagagtaagttgtagaaattatgtttctttattcctaaatacctcattgtgtatttcctaacaaggacattcttttatataattaaattttaataataaaaatcagaaaatttaacatcaatgcaatataattatttagcctatagtccatatttaaattctaccataccttatagtatattttactatacctcatagtaattttttttagtccaaaatatcacacattgcatttagttgccatgtctcttttttttttttttttttgagacagggtctcactctttcgcccaggctggaatgcagtggtatgatcttggctcactgcaacctccgcctcccaggttcaaatgattctcctgccttagcctcctgagtagctgggactacaggcatgtgccaccacactcccaccacacccagctaatttttgtatttttagtagagacaaggtttcactatgttggccaggctagtcttgaactcctgacctcaagtgatctgcccacctcagctaagtgctgggattacaggcgtgagccaccatgtgtggcctagttgccatgtctctttaatctactttaatctgaaacagttcctcagccttgtttgtttatatgaaactgacatttgtaaagactagaagccatttgtcttgtataatgcctttaatttatatttgttttatgtttcctcgtgattttatatatagagtttgtttgtttgtttgtctgtttgtttgttttgagatggagtctcattcttgtcacccaggctggaatgcagtggcgcagtctcggctcactgcaacttctgcctcccaggttcaagcaattctcctgcctcagcctcctgagtagctgggattacagatgcctgccaccatgcctggctaatttttgtacttttagtagaaacggggttttgccatgttgcccaggatggtctccaactcctgacctcaggtgatccgcccgccttggcctcccaaagtgccgggattacaggcatgagccaccgtgcccggacctcatgattgtatttatttatttatttaatattattattattatttttttttttttgagatggggtcttgctctgtcacccaggctggtgtgcagtggtgcgatatcggctcactgcaaccgctgcctcccagattcaagcaattctcctacctcagcctcccaagtagctgggattacaggcatgtgccaccacacccggctaatttttttgtattttttttagtagagacgaggtttcaccatattggccaggctggtctcgaactcctgaccttgtgatccacccaccttgacctcccaaagtgttgggattacaggcgtgagccaccacacccagccttatgattgtatttagactagacatttttttggtagtatattatttagccattgctgtgtaacaaattatcccaaaacttagtggcttaaaagaagcatttattatctcataaattttgtggatcaggactgggtatagctttgctgagtgcctctgcctcaaagtcttacaaggcagcaattaaagtgtcacctaaggctattgtcttatctgaagggtcaacagaggatggatccgcttctaatctctctcacatagttaatggcaaaattaagttccttgtggattgttagactaagggttccagttccttgctggttgttagcttgaggtctacctcagttccttgccatgtggacctccatagggcaaccagcttctgttagagcaagtaaaggagagtgccagagagggcaaatgtgatgaaagccacaatctttttataaacctaattttgaaagtgacatacaaggctaggcatggtggctcaaacctgtaattccagcactctgagaggccaaggagggtggactgcttgagcccaggagttcaagaccagcctgggtaacatgacaaaaccctgcctctactaaaaatacaaaaattagctggtctggtggtgcatgcctatagtcccagctactcaggaggctgaggccagagaattgcttgaacccaggaggcggaggttacagtgagccgagatcacaccactccactccagcctaggccacagaatgaaaccctgtcaagaaagaaaggaaggaacaagggagggagggaggaaggaagggaggtagggaggcagggaaagaccgagaaagtgacataccatcatttttgctgtagtttgttcattagaagcaaaatcacttggtccagcccacactctggggagatgattttctaactccatttgtaataacttattctacttttattagttggcattatacagtaagaaagagctttcttttctcttcttatttattcatatatggctcatgtgttttttccaatgagttatattctattactaacattttttattttgacctcaaattgttttagatgttaccaataagaacctcttcaagctggttcttgtgtccttttgccataactctctcattttcttgaaccctttcttactttctgatataagaaaatattagagactcatactttccttgttccagttctgagatgaaccatttatccaaaagccttgcttcattttagtagggaatagtatttagaaactaagatctgggtgtgaggtatgctcactgctaatgggctgtcactgtttctaggccttgtcagcagacggagctaggaaaaacacacataaacacacccatatttatatttgtacacacactccctcaaaatcgtgagttcatattgatacctccagttctggttcttcctagccttccccctttccatctttgtatttttattttccaacagtaagaaccctggctcccagtgctatgaatatatttactcatttgctccatccactgcactccagcctaggccacagaatgaaaccctgtcaagaaagaaaggaaggaatgagggagggagggagagaggaagagagagaaggaagaaggaagggagggagggaaaactgagaaagtaacataccatcatttttgctgtagtttgttcataagaagcaaaatcacttggtccagcccacactctggggagatgattttctaactccatttgtaataatttattccacttttattagttggcattatacagtaagaaagagctgctgaagatttgcttgcaattggttgtctttaaactgagggtatattgtcaaagtactgtgctgaaaagttacctgtagtatagttatgtgattcattaaaataaagtttgtttctattatgtgcagttttagagttttgccacactctggttgattagtatattttctgttgcttttttgttttgttttgttttgttttgtttttgagatagggtctcgctatgtcacccaggctggagtccagtggtacaatcacagctcactgcagcctcaacctcgtgcacttaagcgatcctcccacctcagcctcccaaatagctggggctgcaagtgcacaccaccatgactggctaattttttaattatttatttatttatttatttattttagagatggggtctcactatgtttccccaggctgaccctgaactcctggggtcaagtgatcctcctgccttagcctccaagtgctggtattacaggcataagccaccacacctagcctagtattcttttttgaatatgtaaaacattaacataaagtcaaaactattaaaaaaaggtgtactcagaaaattgtcattcctcccctataccttctgcctcattcacaccacactctgtagataatcgatttcattagtttgtggtttatcctcactgtgtttctttttgcaaaacgcaaaaacaaaacctatacatatttatattttcttatgtcctcttctttcttacacaaaaggtaacacactatgtaggtagtcctggctttgaacagtttcactataaaaatatttgttactacagcttaaataacataagtctcctaaaaataattcaaattttagttaccatggtatattaactttgagtagttccataaaggacaaacttggctgctagcccttcagtccacagagcactttgaaaataacagatgagcaaaataatgtggccaatcacatgacttctttcaaagtatgtcagtgatcagtcactgtgtgcctataatttagttcatgcacagacagcaaagcatgtagttgtgttgccttccagtgataaacccacataacattttagaaaaatgtattaagaattggccagcaaagataaaagtgcagcaaagaaacaaaagtgataatgttttcagtgaaatttgaattgaacataaatggagttatagaagaaatagctgaccatgggaatgttcacactgctactttcaagaatctctagaagggcagctaaaggagcttagtgaaggtgaatttattgacatgaatgagaaaagtaattgtgatgaaaaggatgaagatgtcccagagaaagtaatgccagcaaaaacttcacattaaaggaactctcagatatttcaaagcattgaaacctccaagaataaataaaatgttggaagttgatccaaacttagaaaggagtatggcaacttgtcaagatgaagaaaaggtgcttattcctttttatttatttatttagagacagagtttcactcttgttgcccaggctggagtgcaatggcatgatctcagctcaccgcaacctccacctcctggattcaggcagttctcctgcctcagcctcccaagtagctgagattacaggcatgtgccaccacgcccggctaattttgtatttttagtagagacagggtttctccatgttggtcaggctggtctcgaacccccaacctcaggtgatctgcccacctcggcctcccaaaacactgggattacaggcatgagccaccatgctccacctgcttattccatattatatgttataggatgaaaagaggccaaactaatcttgacatgttttttacaaggaaataatcctccatggttctaatttttttttttttttttttttttttttttgagacagagtcgcgctctgtcacccaggctggagtgcagtggcacgatcttggctcactgctagcaccgcctcccgggttcacgccattctcctgcctcagcctcccgagtagctgggactacaggcgccggccaccacgcctggctaattttttaaaaaatatttttagtagagacggggtttcaccgtgttagccaggatggtctcgatctcctgacctcgtgatccgcccgcctcggcctcccaaagtgctgggattacaggcttgagccactgcgcccggtgggtctaatgttttaaattacactgtgttaaataaatattagtttgttggttttttttttagtttttttatttctctacaaatttacaaccaataagagtttttaatgctttgacaaaaaatgttaaaggtcatagtacaatcgcatttcttcccattgattattaacatcactttacatagtttcatcttgcattagcaattttgtgtgtgtgtttgtggttttaaggagcggagagtttaataggcaagaaggaagggagaagacagaaggaaggagctcccccttacagagacagagggagcggggctccaaaagaggaggtccccatctaccgcggataccagccaggtatatatgcagaggctggtggaggtgatgtctgatttgcatagggctcaggggattggtttgaccaggcatatcattcacgtagcccgagaaaaagctggccctcccaccccagccttttaatatgcaaacgtagggcgccatggatgttctaaacacgtggagatatgtggggggcagccatgtggccaggaacttgtggggcaagggcaagaaggctgtgggaatcgccaagttgaatggacctagtttctaatggcctgcatttgcatatcaaaggttgctggcctggctcctagagccggggctttaaaagaaacttttccggagatgctttaaaaaatgaaaacttcccaaggaccccttttcctgtctatctgcataaaataatttcttttattatttatttatttatttatttatttatttatttatttatttatttatttattttgagacggagtctcgctctgtcgcccaggctggagtgcagtggcgcgatctcagctcactgcaagctccgcctctcgggttcatgccattctcctgcctcagcctcccgagtagctgggactacaggcgcccaccaccacgtccggctaattttttgtattttcagtagagacgggatttcaccgtgttagccaggatggtctccatctcctgacctcctgatccgcccgcctcggcctcctaaagtgctgggattacagaataatttcttaataactcctaccacattcctccctgtggcgatatcaaactaactgctgttaggaggctttgggcgaccattgcttctggctacttcctgctgaaaaggggcgtctaatggagaacagcagctagggctcctcctggggttgatctaagggtcctcggaagaatggcgtccatgtgtggttcagtttacagcaccgtttggagtttgattgcttctaggcgagaagaaacaattcaagttatagtattgagtatacagagtccaaatatcaatacaagacatataagcaagagagtgcttaataaaggggttaaccaattccataaagaagactggaagtaattaaagagggattgtagccactcggggctgaagcccacattttccctgagcctgtcaataattttgatttgatttttaagtccctgtagatttgcctcttctttactacaggtgttaatcccaaagaagcatgtttcatttaaaaatgcattactggccaggcgtggtggctcgcgcctgtaatcccagcactttgggaggctgaggcgggagcatcatgaggtcaggagtttgagaccagcctggcctacatggcaaaaccccatctctactaaaaatacaaaaaattagccatcgtggtagtgggcgcctgtaatcccagctaattgggaggctgaggcaggagaatcgcttgaacccgggaggcagaggttgcagtgagccgagatcgcaccactgcactccagcctgggcaacagagcaaaactccatctcaaaacaaaacaaacaaacaaacaaacaaaaactgcattactaaatccaataaaaagtcctagtagactcagtgatagtaaaactttcatgcttcctttttgccagtaactattatccctgctataaggatactaattaagcaaaatacgacagcaatggaaactctgtccaatatttcagttagaaggtgctaccatggataaccctattgcaaatagtagagtgaggaaagcagttcccacaaatgtggtgtggtaggtaatttccatctaaaattttacttgccaacatatagaattcccctctgtgggcctacgaagttccttggttttattttcccaaacaaagaaacctccgggttacaggtaccttacttactttcattacctggcacaatttgcaaaataattgcccagaactagcatattgattcacattttcacattacccatccctttttcccccccaccaagctgcagaagatcaccacttgattcacaggaataagcagggccagggttagtctaaaatgtaggcaaaaagcttaaaaacaattaatgagactagggtttaatgacaaatgtatgataagctttggagcaaaatttttctctccagtcctcatttttggtaaaaactaattatgaatgaactttaatcttatacttggcctgattatttgcatgaagtgcagcaagaatggttatttctacataggacttttggattggctttgatgaaacactgttccacaaggaatttcagattagacttttaaagctgagcccagacatgggtttgtatcctctaatacctgtgagttgggttatcctctcctcttgaggtcccaagataaactcagagcttccagacctgttagaaagtgacattcttcactgaccacaggttaggaaccctgtgtggggactgtgtagacaaggtgtgaggccagttctccccaaggggcttttattggctctgcatgtcaagcttgattccttaaagggaaacacaccctttcagttaaagccttggcaaaataaccggtttttccaattgtgttctgttgacaaagaaaaatggattcttgctgcactgatgcgaacaactatattgccgtaagttaagagtacttacagatagtctccaaattttagaggaaccaggcagagaaaaatgaacatgctccaaattttgttcacagtagtataccttacttgattattaaaggccataaatagtttaaaataagtttcctttcccagtccatgcaccaaaatgatacggctctgatgagtggaggaacaacagggttcctggtcctcatgctggtttagataaaatgacacagacacatgtggagtggttttaaggagtggagagtttaataagcaagaaggaagggagaagagagaaggaagacgctcccccttgcagagacggagcgggggttccaaagctgaaagaggaggtcccccacattaacaatttttaaaataccgtacaactgcagaaaatgaggactgcctgtacatactgtttgacactttgtttttttttttaacttatcaactttattttgtttgtttgttttggttttgggtttttgtttgtttgtttgttttggagacgagtctcactctgtcagccaggctggagtgcagtggcacaatcccagctcactgcaacctccacctctcgggttcaagcaattctactgcctcagcctcccgagtagctgggattacaggtattcgccaccacatccagctattggttttggtttttgagacagggtcttgctgtgtcacacaggctggagtgcagtggtgtgatctcagctcactgcaacctctgcctcccaggctcaagtgatcctcccacctcagccttccaagtagctgggactacaggcatgcacaccatgcgcagctaattttttctattttttgtggagacggggtctcactatgttgcttaggttggtcacaaattcacagcctcaagcagtcctcctgcctcaccctcccaaagtgctgggattacaggcatgagccaccacatccagccttaccagctatattgaagtataatttatataacataaaatttgccttttaaaattatacagtgcaatgcattttgacaattgtttacatctgtgtaaccaccatgcaatcaaaatatagaacatttctataaccttcaaaagttccctcatgcccctttgcaatcaattcactacttctccagctccaggcaacaactggtctgcttcctgtcactataaattagtgttgcctctttcagaatttcatctaaatggaatcctataacatatactattttgtatccatcttcttttactccaaagttcttgaaattcattcatgttcctgtgtgtatcagcagcgtgttccatttgattgttgagcagtattgcattgtgtggatatatcacaatgtgttcattcattcaactgttggtggacatttgagttgtgtccagtttagtgctattctgaattaaagtgatgtgaacaatcatgtacaagtatttttgtaggcatattttttttatttctcttggataaataccccaaaacagaattgttttgggggtcatatgaaatgggaagtatatgcttaactttataagaagctgccaaactatttttcaaaatggtaatatcactttacattttcatgagcaatgcataaagcgttccgcttgctacattttctcaccaatgcttcctattgtcaattttttaaattttagcaattctagtgggtgtgtgatactatctcattgaagtttcaactgtttttccctgttgactagagacactgagcaacttttcatgtgttgtctatttgtatatcttcttgaagcattcgttcatctttaactgagctgaacgccttcttaaaattgagctatgggagttttaaaatatatccttgtagctgggcgtgatggcaggtgcctgtaatcccagctactcaggaggctgagacaggagaatcgcttgaacccaggaggcggaggttgcagtgagccgagactgcaccactgcactccagcctgggcaacagagtgagacttcatctaaaaaataataattatacatgtaattatatatgatttttatatatgtaatatatatattcttgatgtgagctctttgtcacatacatattttgtggatattttatcccagactatgacttgtcttttcattttcttagttgtgtcttttgaagagcagaagatgtaattttgataaagcccaatttattttttcttttatagtttgtatttcttatgtcctattcaaaaactccttgcctactgaaaacttatgatgattttctcctatattttcttttagaagttttatagttttaccatttataatttggtctatgaatccttttgagttgatgtttatgtatggtgtatggtgtgaggtaacaatgaagattcatatttttttccaaaggaatatccaattgtctctttggaaaaatatgctgagaaggctatcttttccccaccaaataatcttagcaccttaatcaaaaatcatttggccatggacatatgtaggtgtgggttttttctgggctctctgtgttagatggatagatagacagatacagatatataactgtgtttacacatatgtaactgtaaacacagttatatatctatatatccaccaacagttgaatgagaataaactattgttataagcatatatacacattgtatatatatgtgtacatatacatattgcatatgtatgtatacatatatacacacaaagtatatatatgtatgtatacatatatacacacttaaagtaatggcctccagttcgatccaagttgctgcaaaggacattatttcatgccttttcgtggctgagtaatattccatggtgtatatatatatatgtgtgtgtgtatatatatgtattatgtatatatatatgtgtgtgtgtgtgtgtgtgtgtatatatatatatgtgtatatatatataccacattttctttatccactcattagtcgatggggacttaggttggtttcacatttttgcaattgtgaattgtgctgctataaacatatgtgtccaagtgtctttttcatataattacttattttcctttgggtagatacccaatagtgggattgctggattgaatggtagatctgttttttgctctttagagaatctccatactgttttccatagaggttgtactaatttatattcccagcagcaatgtgtaagtgttctcttttccccacatccacaccaacatctattgttttttgactttttaataatggccattcttgcaggaccaaggtggtagctcgttgtggttttaatttgcattttcctgatgattagcgatgttgagcattttttcatatgtttgtgggccatttgtataccttcttttgagaaatggctatttgtgtcctttgcctactttttaatgggattgtgttttatttttcttggtgatttgttagttccttgtagattctggatactagtcctttgtcagatgtgtactttgcaaagataatattttggatgttatatttccattataatttagttcaaagtattttctaatacaccttgcaatttcttctttgacccatggattattttaaagtttgttattttgtttgtttattttgagacagagtttcactttttttgcccaggctggagtgcagtggcacaatcccggctcccagattcaagcgattctcctgcctcagcctcccaagtagctgggattacaggtgcccaccaccacacccagctaatttttttttcttttttttttgagacagagttttgctcttgttgcccaggctggagtgcaatggcacgatctcggctcactgcaacctctgcctcctgggttccagcaattctcctgcctcaacctcctgagtagctgggattccaggcatatgccaccacgccaggctaattttgtatttttaatagagacggggtttcttcatgttggtcaggcgggtcttgaactcccgacctcaggtgatctgcccgccttggcctcccaaaatgctgggattacaggcatgagccactgcacccagtccaattttttgtatttttagtagagatggggtttcatcatgttggccaggctggtcttgaactcctgacctcaggtgatccgcctgcctcggcctcccaaagtgcagggattacaggtatgagccaccatgaccagcctaaagtgtattgtttagtcaccaaatatgtaagtattacccaaatatatttgtcactgatttctaatttaattgtattgtgatccaaaaatatacattgtatagtttctattcttttaaattcgttaacatttcttttatggcacagaatatggtctatcttggtgagtgttgcttacacacaactgtgtaactgaaaactgtgtattctgcttctcgtggttgttgtatcctataattgtcaactagatcaagttagtaagagtgttgttcagtgatcttttcttcttcagtgtttactgtatttgctaatcccatccagtgaagtttccatttcatatattgtatttttcacttttagaagttccatttgactctttcatttccatcctcaattatcttcatatttttctttaaatttttgagcacatttataatggaggttttaaagtccttgtctgctaattttgtcacctctgtaattcctatgatgattttcttcctggcttggggtcataatttgttgcttatttgcatgtctaataatgtttttattggacagcagacattgtaaatgttatatttttgagtgtttggattttgtctttctttaagaactattgcagtttgttttggaaggctattatgttttttgcagatcaggttgatcttttcaaggcttgtttttaagctttgttaggacaggtctgtagtaacttttgccttgggctaatttagacctaccacttaattctgacttttttgattaatctgagtgttcagcagggtctctttattatggctaaatgaaattcaaacattttccagccctatgtgaccatcaagaattcagctaatagctccctggcagttcttcgcccagctgcagaaaagtgtcagtgcactctatgtatgctcagattattatttagccaaagacttggggatccatattaatattcctggagttctttgtgtagctccattctctttagtactctatcccataaattctggctgcctcaatctcctaatctccccaaactctaatatctattcctcaactcagcaaaaccatggtgttattcttggatttcccctttcctgccccacagtctgaaagttgtctccaggcaaaaaaaatggagatcctagtttgcggatcctcatttccttctccttttttttttttttttttttttttttttgagatggagtctcgctctgtcacccaggctggagtgacgtggcgtgatctcggcttactagaaactccggctcccgggttcatgccattctcctgcctcagcctcccgagtagctgggactacaggtgcctgccaccatgcccggctaattttttgtattttgtttagtagagacggggtttcaccgtgttagccaggatggtctggatgacctcgtgatctgctcacctcggcctccaaaagtgctgggattacaggcatgagccaccgcgcccggcctgcttctcttctcttatgggttagaatcctgcactgtcttttgaacaaatgtctaaaagcttttatcacacattttgatccacttcccagttgttatagtggtatatctggtttcacatgactgaaaggaaaagttttcaccttgctttttgtactaataatatatcctggaaatcattctatataaatttatagaaatcttcatttttaaaatagcttcataaaactccattgtaaaaaccaggtgcagtggctcatgcttgtaatcccacactttgggaggccaaggcgggtggatcacctgaggtcaggagttcaaggccagcctggccaacatggtgaaactccgtctctactaaaaatacaaaaattagctgggtgtggtggtgggcgcctgtagtcccagctacttggaaggctgaggcaggagaattgcttgatttcaggaggcggagattgcagtgagctgagattgcgccactgcactccagcctgggctacagagcgagactccgtctaaaaaaaaaaaaaagcaaaaaaaaaaactccattgtatgtgcacatatcattatctgttcaacccatctatgacttgtcatttaggtagtttccatccaatatttttgcaatataaaaaatgctaatgaagaacctgagatatatatatatctatatatatagatatatatgtttgttgttgttgttgttatttttgaagtatgtacgtataataaattcctaatagtgtgattgctgcatcataaggtaaaggcatatgtagttttgttaaatatagctattccccatcttgcattcctacaaatagatgagaatgtccattgtcccatagtctcctttgcagagtatattgtcaagctttttaattgttgccaacctgatgggtaaaaagatatctccaaataattttaattaaaatttctcttattatgaatgaggttaaatagtttttcatatgtttaaaagccagtttatatctttttgtttttttagagacaggaatcttgttctgttgcccaggccaaattgcagtgatgcagtcatagctcactgtagcctcgcactcctgggctcaagcaatcctcctaccttagcctcccaagtagctaggactacagatggatgccaccatgtccagctaatttttttatttttttgtagagatgtgaggtctcactatgttgcccaggcttgtcttgaactactggcttcaagtgatcctcccacctcagcctcccaaagtgctaagattacagccatgaaccaccacaaatgaccctatatatttttttgaattgtctgttcatgtcttattttcatttttctagtagttttttttttaagtgttttagcctaaatttgtaaaaagtttaggggatatatgaagggactctaaatgtttatgaagaaatttaattaaaagataaaaataaaaatataagctttatttttcaacatgagctccatcaagttcaaggcacttttgtaagcaatgatactagccatttagttcacccctaaagaactgagagtcctgggaatttagccatgtcaatgcagtattttttatattggttactgaagaaaaaatgggtgccctttaaagttgtaagattaggaacaaaaacaagtcagaagaagccaaatcagcactgaaaggtgggcacttaatgattacccaagaaaactctcaccaaattgcccttgcttcatgagaggaatgagcgggagcattgtcgtggtcaggaaggattctggggaagttttcccaggcattttttctgctgaagctttggtaactttctcaaaacactctcataataatcagatcttatcactctttggccctccaggaagtcaaccagcaaaatgctttgaacatcccaaaaaagcgcttgccatgacatttgctcttgaccagtctgcttttgcattggtcaaatgccaccacttccacctcttgtgctttgttttcaggatcagactggtaaagtcatgtttcatctcttgttacagtttttttttttttaagaaacccttcaggatcttgatcacatttgtttaaaatttcaactgaggctgggcccagtggctcatgcctgtaatcccagcactttgggaggccgaggcgggcaaatcacgaggtcaggatttcgagtccatcctggctaacatggtgaaaccccatctctactaaaaatacaaaaaattagccgggcatggtggcaggcacctgtagtcccagctactcgggagggtgaggcaggagaacggcatgaacccaggagacggagcttgcagtgagctgatatcatgccactgcactccagcctgggcaacagagtgagactccagctcaaaaaaaaaatcaagtgaaaactctggtcttaaactgcagctgatctattttatttttattttttttcagacacagccttgctctgttacccaggctggagtgcagtggcaccatcatggctcaatgcagccttggcctcgtgagctcaagcaatcttcccacctcaggctcccaagtagctgggactacaggcacatgctaccatgcctggataatttttttgcagctaatctagatgtaatggttttggcacccatctaatggaaagtttgctcaactttaatttttcagtcagaattgtgtaagctgaaccgagatgtctatggtgttggctattgtttctgctgttaattgtaggtcttctttaattagagcacagacaagatcattttttttcctcccaaattgatgtagatggtcttttgctgtgggcttcatcttcaacattgtctcatcccttcttaaaacaagctagctacttgtaaactgccgttttctttggagcattgtctccataaacttttcacaaaacatcagtgatttcaccgttcttccactcaagcttcatcataaatttgatgtctgttcttgtttccattttagcagaattcatgttactctgataggggctcttttcaaactgttatcttattcttcttagtgcctcaaactagatcctattcagacatggtataacaagttagtatgggtttattttggtgcaagaaatattttgaaatccacacatttttttcataatatgcattttccatgaagtttttgaaaactccttgtattaggaatattagtcctttgtccagtaaacagactgcaaatattttctcacagctcatcatttaccttttggcatttttttgcaatgcaatttttttccctttgtttttgttttttgtgtaatgaatcaatgttttcttttttttttttttttagaccaagtctcactctgtcacacaggctggagtacaatggtgcaatctcagctcactgcaacctctgcctcccaggttcaagtgattctcatctctcagcctcccaagtagctgggattacaggcacatgccaccatgcctggctaatttttgtatttttagtagagatggggtttcaccatgttggccaggctggtctcgaactcttgacctcaagtgatccactcacctcggcctcccacagtgctgggattagagacgtaagccactgcccccggccaaatcaacgttttcttatattgcatttaggttttaagtcatagttagaaagcctttccccacacctaggttatagaaacattcattacttttttcttccagtgctagtacttgcatggtttttggtttccacatttagatccctgatctaattggagtttattcttttgtgtgctgagatatggatctgattatatcttttttcccaaatggctatccagttgtcccaatgccatttattaagcacttcatctttgtcccagtgatttgagatagcatctttatcatgtaccaaacttctatagtgccagaagatttttattttttttagacagggtctggctctgttgcccaggctggagtgtagtggcacaatcccagctcgctgcaacctccgcctcacatgctcaagtgcccgcacctcagcctctcaagtagctgggactacaggcacatgccaccacaccaggctgatttttatatttttttgtagaatgagatttcaccatgttgcccaggctggtctcaaactcctgagctcaagaaatccgcccacctcagcctcccaaaatgctaggattacaagcatgagccaccacacccggctgccagaaaattttaatgatcagaaaaccacaattctttcttcctctgttatatgttgaagtaaaatacttcatttagaaaactaagccgggcacagtggctcacacctgtaatcccagcactttgggaggttgaggcaggcagatcacctgaggttaggagtttgagaccagcctggccaacatggtgaaaccctgtctctgctaaaaatagaaaaatttgctgggcatggtggcgggtgcctgtaattccagctacttgggaggatgaggtaggagaattgcctgaacctgggaggcagaggttgtggtgagccgagaccacgccattgcaccccagcctgggcaacaagagcaacggtaaactccatctcaaaaaaaaaaaaaaaaaaagaaagaaaaaagaaataactcagccatacaaggctacccatttggtgagaactaataataagttagatagcaaggtaatagcaaaatgtgggtgcaaaattaaagcaagttatttctgaggagaatgtaggtctcatggaagattttcatgtggacaaatttagtaaattttttgcaggtagtttcctgacatatttaacatttgtgatatagtaaacaataagaaggtactaaaggctgggcgcggtggctcacgcctgtaatcccagcactttgggaggccgaggtgggcggatcacaaggtcaggagatcaagaccatcctggctaacacggtgaaaccccgtctctactaaaaatataaaaagttagctgggcgtggtggcgggtgcctgtagtcccagctactcgggaggctgaggcaggagaatggcgtgaacccgggaggcggaacttgcagtgagccaagatcaagccactgcactccagcctgggcaacagagcgagactccatctcaaaaataataataataataataaggtactaatatgatccagactagaagagaatagcactaaaatgggagatggggtaaacctgtggttttttttaccttaggcttttgacttccaaaattattgtttttgctgggtgcggtgggtcactcctgtaatcccagcactttgggaggccaaggtgggaggattgcttgagcctaggagtttgagaccattctaggcaacaaagcaagaacctgtctctaaaaaaatttaaaaattagccagaaatggtggcacatgtctgtagtcccagctacttgggaggctgaggcaagaggattgcttgagccttttgaagttgaggcttcagtgagccatgatcaccccactgcactccagcttgggcaacagagcaagaccccatctcaaaaaataaaacaaaatagactgggcacgatggctcacgcctgtaatcccaccactttgggaggctgaggtggatggatcatgaggtaaagagatcgagaccatcctggccaacatggtgaaaccccgtttctactaaaaatataaaacttagctgggcgtggtggtgcacacctgtagtctcagctactcgggaggctgaggcaggagaatcgcttgaacccgggaggtggaggttgcagtgagccaagattgtgccactgcactccagcctggcgacagagtgagactctgtctctaaataaataaataaataaaacaaaataagtaaaataaaataaatgtttgtagttccaaaatattttgatgacataatttcttcttgttctaataaaactacatatgcattggtcctatgacctagtaatcacactattaggaatttatcataaatacacacctcaaaaattacaaaaatacatatataccagcttatttattacagcgttatttgtaattgcaaaaacattgtagatagaatggaggtcacataaaacttattcttaagattcagaccgggtgcaatggctcacgcctgtaatctcggcactttgggaagccgaggcaggcagaccacccgaggtcaggagtttgagaccagcctggccagcatggtgaaaccccatctgtaccaaaaatacaaaaattagctggtcgtcgtggcacgcctgtaatcccagctactcgggatgctgaggcgcgagaactgtttgaaccccggaggcagagactgtagtgatctgagatcatgccactacattccagtctgagcaacagagcaagacttcgtctcaaaaaaaaagatcatagatcatcttatcaaatcaaagtatgcaaaatattcaagtaaacttcagataaatatgaaggctaaaccattcagcttcttcaccaaacccttgaatgtcccacctgtctaaatggagatacatgtttgtttgatttattggttaactgtttttattccatttttcctcaaatgatcccataatttgaccttaggaagctgttcaaatagacacattaggttgaatggaaagactactcgatgatatttaggattttaagaggattttatgtattttttccttgtgtgcaataatttaatagcatcttgaataggattttctgatattactaaccctctgggaataatattaggtaattagacagttagctaatattaaaatatgtatcaggtaatatttattgagagtttcctctgtgccaagcaggatcaacttcataggcaggcgacctgtgcggggacacagggcttcatgcttagataggcccccttgctttgaaggcccctaccctttggttagggctctgctgttaccatcttgaaattcttaataatttttattttatttttttgagtcagggtcttgctctgtcgccctggctggagtgcagtggactcactacagtcttgaattcctgggctcaagcaatcctcccacttcagccttctgagtagttaggacgacaaacacacgccaccatgctcagataagttttttgtttgtttgtttttttgtttttgtttttgttttttgtagagatgggactgtccctatgttgctcaggctggtctcaaattcctggcctcaagtgatcctcccacctcagcctcccaaagtgctgggactacaggcatgagccactgtgcctggtcaatcatttttattaacaagcccaagccctcttttttttttttttttttttgagacagggtctccctctgttgtccaggctagagtgcagtggtgcgatcttaccttcactgcaacctctgcctcctgggttcaagtgattctcctggctcagcctccctagtagctggaattacaggcacccacccccatgcctggcaatttttttgtatttttagtagagatggggtttcaccatgttggcaaggctggtctcaaactcctgacctcaagtgatccacccaactcggcctcccaaagtgctgggattacaggtatgatccactgcgcccggcctccaagccccctatttttattttgcactgaccctacaagttacgtagctaggcttagttatgtttttagcaaggaaagtgtataatctcatgtaccttttgaaagattactcaggtctctgcatgtgaaatggaatttagggaatgcaagagagggagtaaaaataacagcgaggaagctatgatagcatttaaggttgctttgactcaggggtagcagtagatagggtaagtaattgatagtttcaaaatatattttgggagtagtaagcattggtatggattagtaatatactggatgtggggatgcagaaaaaaatattaaaaattacttctgaaattctggctggaatagaagtgccacttaccaggtaaggaaggttggagacataacatatttgagggtgtggtcaaaagatgagtttgacattatgctatgtcatataaaagacatataaaagactacctattttataattcctttttaataaaatattcagaaaaagcaaaactgtggttgcctgaggctgaagctaggaagattgactacagacaagcatgagggaaattttgggggtgatgagagttttctaaaactggattgtggggttggttgcattactgtataaatttattaaaaatccctgcatcgtataggggcactatattgtatgtagaaagctgtgaaaagattttaaaaatgattgacatgtctgtggttatatcaatgagtactattattattcccattttatacataaagaaaataaaagagaagttaaaaataaaagtttcatggttacatagctactaggtgtaatatccagtattggaatttgaatctttttgacactaagaccttactctcgatcatataatacattcactttctattttaaagttatattatagccgggcacagtggctcacacctgtaatcccagcactttgggaagccgaggcaggcagatcacgaggttgggagatcgagaccatcctggctaacacggtgaaaccccgtctccactaaaaatagaaaaaattagccaggcgtggtggcacgcacctgtatcccagctactagggaggctgaggcaggagaatcgcttgaacccagaaggcagagcttgcagtgagacgagatcgtgccactgcactccagcctgggtgacagagtgagacaccatctcaagaaaaaaaaaattatattataaatgctgcatctcattggtcagaagctctcttgaaattataaaacaaagaagaaaaaagataaagactgggaaattgtgttgaatcagtatataaatcctgtatactggtccttccatttcccctagaaataagtgatacaggccaggcgctgtggctcacacctgtaatcccagcactttgggaggcggaggctggcagatcacctgaggttgggagttcaagatcagcctgaccaacatggagaaacccccgtctctactaaaaatagaaaattagctgggcatggtggcacatgcctgtattcccagctactcgggaggctgaggcaggagaattgcttgaacccaagaggaggaggttgtggtgagccaagattatgccattgcactccagcctggggaacaagagtgaaactcaaaaaaaaaaaaaaaaagaaagaaaaagaaaaagaaagaaggaaggaaggaaggaaagaaagaaagaagtgatacaacaagttacagcatctttgtttattatccactgtgagttgtattaccacactttacttggctctttggcaaactatattatctcttcagatcactagggctaggaaggcccactggtaacttgaaggagtaaatgtatcttctaaaaaatgcttacttccagggagattggatccacacaagtgaatacatatatagtccttagtgtatgctatgattattttactatgtcagtagcataaagattgctatattaataagcattaagtgcctgctgtgctagacagtgaggatgcaagtggccaccaaaatagcatggtccctgccctcctggagcttctttttttcttcttcagtgggggaagcagatactttgcttatgcaaaaataattataaaatttaaagttgtgccaagttcaatggaaaaaatataaggtgttctgagagagcataacaaaggatcctggttttaactggggcctaatggaagacctctattaggaaataacatttaaactaagaccagacagacctgtagaaattagcaaagcaaagggagggaggaaaaagcagctttcctggcaaaggaacaatttgtgtgaaggccctgagacagggaagggctggggttctgaccaccctccaagtggtgcaatggaatatagtgagagagggagaagacatgagaacttggatactatgcaaaggatttggtattttaattcaagagcagtatgatgctactgaggagcagctggacaattgtgtgatccaattaaaattttaggaagatgaacctcgctattgtggagaatgcatacacaagggttctgttggttcatgaagaggtcttaagaaaactatgagctgggtgcagtagctcaggcctgtagtcccatctacttagaagtctgaggcgggaggatcccttgagcccaaggagctggaagttacagtgagctatgattattccactgtactccagcctggatgacagagcgagatcctgcctcagaaacaaaaaccaaaaaacaaacaacaacaaaaacaacaacaacgaaaatctcagaaaactacaggccttattatcaagaaaatgacaggccttattattgagaaaactacttacatttttaaaagctgattttcaaaaaccagattgtgaattaagtgatgctgaataggggaaaaaaagactgataaaccagtgtatctctgaataacccactagatcagtgcttgtcaaactttaatgtgttttcaaatcaccctgatgttttgttaaaatgtaagtcatgtctcagtaggtctagaggagggcatttctgcatttctaacaagctccccggtgatgcctagaccattggtcctcacactttgagtagcaagtgattgggctatactctttattctaaattctaaatgtattctatcttctaatgcctatcagccctcttgctggtctggctaattatcaaacttgagcatttaaaactgggggttttcagagattaattgaagtgttaaagacatggaaatataggtcacatatggcttttcatctcttccggaaatatcctatatatccttacttcttttctacctacctaacctatgtgcctaccccttcacttatgttcaaggttctattatacttcaaaaggactctatgcaatcaaagtgatgtccaagacaaatatacagaaatagtatgaggctctaacactttacatctaatggagtggtttgcatcattaattgaggcttactctgtgccaggcactttacctgccttcttcatttaataggataggagcaggaactcttagaggttcatttcttgttcaaggatatacatctcatctctggcttatatcacagtggactcttttattcactatcctaatcattataattttgtttggtgacaacaattctaaatgcagaaaagttaaggctctttattctgtgactaaaggctttgtattttctaaagatttgtggagctttgctgccattatttcaataattttataaagatcctaggtggtaaataggcctggctttttttctttttgaaatcttctccgtcttcttcttcattagcagtgcaacttcttgtggcatatggtacccaagatcttgggaaaaggattgatcaagtaaagggaaacgatagagagagtgtgctctacaactgagatcatgctccttgtgaaagacagggtagggaaatttcttattgctccctggttcttaagaaatgagagctaacaatgacatccagttttaaaagaaataaaatctgaattgtacttttaaattttataagccagagttaaaccaatagattgtaactcctgctaatttgatagtagctccagataatgaggaagtgacagggaatgctaatttcatttggtaagagataaaactgaaattattaatgtctccacggaaatgctaaatgcctccttacaagtagggtccggctaattgtctgtcttccaacaagccagatttgttggtgtttttccagacaatgttgtgtagttttcggtttggttcgatcccctttcttgtgatcaaagaaagtgattcaaatgtttaatgagtcttgatttggattggagacttgcagaacggctagcctcacagccccaaggctggctttccctaaggtaggtttcctatgcaccgatactggcaaggcgctttggctggaaactctggaaggaagccaaaggaaagtgaagttcctggcgctagcgcgtgtcctgctcagagagcccggcgctagctcattcttcgtgcagttattggctgggactctgtgtgccgctgtcggccaatgaagacgctggagatcgggcccctgcccgtcccctttctgcgccccgggatgaggcagagactgaacagccggcgagcaaatcaacggcatccagaaagccatgtcggactcggcgcccagcgcccaagcgctaacccgctgaaagtttctcagcgaaatctcagggacgatctggaccccgctgagaggaactgcttttgagtgagatggtcccagaggcctggaggagcggactggtaagcaccgggagggtagtgggagttttgcttctgcttggtgccttgaacaaggcttccacggtcattcactatgagatcccggaggaaagagagaagggtttcgctgtgggcaacgtggtcgcgaaccttggtttggatctcggtagcctctcagcccgcaggttccgggtggtgtctggagctagccgaagattctttgaggtgaaccgggagaccggagagatgtttgtgaacgaccgtctggatcgagaggagctgtgtgggacactgccctcttgcactgtaactctggagttggtagtggagaacccgctggagctgttcagcgtggaagtggtgatccaggacatcaacgacaacaatcctgctttccctacccaggaaatgaaattggagattagcgaggccgtggctccggggacgcgctttccgctcgagagcgcgcacgatcccgatgtgggaagcaactctttacaaacctatgagctgagccgaaatgaatactttgcgcttcgcgtgcagacgcgggaggacagcaccaagtacgcggagctggtgttggagcgcgccctggaccgagaacgggagcctagtctccagttagtgctgacggcgttggacggagggaccccagctctctccgccagcctgcctattcacatcaaggtgctggacgcgaatgacaatgcgcctgtcttcaaccagtccttgtaccgggcgcgcgtcctggaggatgcaccctccggcacgcgcgtggtacaagtccttgcaacggatctggatgaaggccccaacggtgaaattatttactccttcggcagccacaaccgcgccggcgtgcggcaactattcgccttagaccttgtaaccgggatgctgacaatcaagggtcggctggacttcgaggacaccaaactccatgagatttacatccaggccaaagacaagggcgccaatcccgaaggagcacattgcaaagtgttggtggaggttgtggatgtgaatgacaacgccccggagatcacagtcacctccgtgtacagcccagtacccgaggatgcccctctggggactgtcatcgctttgctcagtgtgactgacctggatgctggcgagaacgggctggtgacctgcgaagttccaccgggtctccctttcagccttacttcttccctcaagaattacttcactttgaaaaccagtgcagacctggatcgggagactgtgccagaatacaacctcagcatcaccgcccgagacgccggaaccccttccctctcagcccttacaatagtgcgtgttcaagtgtccgacatcaatgacaaccctccacaatcttctcaatcttcctacgacgtttacattgaagaaaacaacctccccggggctccaatactaaacctaagtgtctgggaccccgacgccccgcagaatgctcggctttctttctttctcttggagcaaggagctgaaaccgggctagtgggtcgctatttcacaataaatcgtgacaatggcatagtgtcatccttagtgcccctagactatgaggatcggcgggaatttgaattaacagctcatatcagcgatgggggcaccccggtcctagccaccaacatcagcgtgaacatatttgtcactgatcgcaatgacaatgccccccaggtcctatatcctcggccaggtgggagctcggtggagatgctgcctcgaggtacctcagctggccacctagtgtcacgggtggtaggctgggacgcggatgcagggcacaatgcctggctctcctacagtctcttgggatcccctaaccagagcctttttgccatagggctgcacactggtcaaatcagtactgcccgtccagtccaagacacagattcacccaggcagactctcacggtcttgatcaaagacaatggggagccttcgctctccaccactgctaccctcactgtgtcagtaaccgaggactctcctgaagcccgagccgagttcccctctggctctgccccccgggagcagaaaaaaaatctcaccttttatctacttctttctctaatcctggtttctgtggggtttgtggtcacagtgttcggagtaatcatattcaaagtttacaagtggaagcagtctagagacctataccgagccccggtgagctcactgtaccgaacaccagggccctccttgcacgcggacgccgtgcggggaggcctgatgtcgccgcacctttaccatcaggtgtatctcaccacggactcccgccgcagcgacccgctgctgaagaaacctggtgcagccagtccactggccagccgccagaacacgctgcggagctgtgatccggtgttctataggcaggtgttgggtgcagagagcgcccctcccggacaggtaaggtttagcaagtcatgcttgaccctgttagtgcttttttattcctacatcatattgaggaaggaatggagctgtttttttagtgatgaagatgttttcctggtgatgcattcacactttcaactggcccttcctagatcaaagttagtgcctttgtgagatggtggcctgccagagtgtggtttgtggtcccatttcagggggaagatacttgactcatctgtggacctaattcacatcctcagcactcttttgctatcacaactaaccaatcttgctaagggatggttaagctaaaacacaagatctcagcgatcagagtttagcttggtatcatttacattaggaataagctgctggatacctctaaccagtggcagcttctaggaatacaaaaactacctcattcctccacctttcaagtgattgtgacatttgtattaaaactaatagctttttgataattttcctttgtttatacagatcgtgtacctcattctcagataattttttatgaatgaaatgaaattccaggcatcctttaaattttatttcaagcattctactggaaatgatgtgcaccctgcttacaaaatatttttaccttataacagtaatgcatgtttgctagaaaattcagaaaatacagaaaagtatttaaaaaattaaaactataatctccaaacccaaagataaccatttttaattataaaagtaataatttatttcaaaaataaatctaggcaacccaagaaaacataaagtagccagactcagtggtgtgcacctgtagttcttgctgctcagtgcctgaggtgggaggattgcttgagcccaggagttctgggctgtggtgcactatgctgatcaattgatcaatccactgtctgcactaagttcagcatgaatacagtgacctcttgggagggcaggaccatcaggttgcctaaagaggggtgaactggcccaggttggaagtggagaaggtcaaaactgctgtgctatccagtagtgggatgacatctgtgaatagccactgcactccagcctaggcaatatagggaaaccatgtctctttaacaataacaacaacaacaacaacaatcccagaaactacaaaaggagagtctttttggtgcctccagtgttagtccctgtccttccagccttatttttcttaagtatatgcacaatgtgaaaggtagataaattcatatccttagacaggtaaagcattcattaattcagggtggtatgcaaggatactatccaaggcatggtatccatgcaaggtgactgcaaggcctttgccctggagagaaccctatacatactctcaactgtaggagaaacactgttattttgttactcagtgcatcattgctatcaactcttggatttggcagttagtcaaatgaggttctaccatttaccaactaggagtctgtggccaagttactcaatctcctttctaagcctcttcctcatatgcaaaaagggaataataagtgttttataagattcatgcatgatataatgtatgcaaagtgtttagcatggtgcctggcatatcataactgttaaacaattattagccagctcctagcattttgggaggctgaggcaggcggattgcttgaggccagcagttcaagaccagcctgagcgacatagtgagatcctgtctctacaaaaaaaaaaaaaaatgtgttttcattagctgggtgtgttggcatgcacctgtggtaccagctacttgggaggctgaagtgggagaattgcttgagcctgggaggttgaagctacagtcagctgtgattgcaccactacacttcaaccatggcaatagagtgagaccctgtctcaaaaaaaaaaattatcagctattactataattatttttattagttcctcactcacctaaaatctcaaacacaccttagaaatacacatatgagaacaaccaaaaatgacaaagtagaagcacatatgaaaaggctaagaaagcatgaaagccagcaagaaataactgccgctcttctggtcagcctggaaagcaactggcattttccctagaacaatgttttcaaacttggttgcacattaaaatcacctagagaccttttaaaaattctgaaacccaggccacaccccgacaaatgaaagcacagtctctgggggtgggacataggcatcattttttgaaggtccccacttgatcctaatgtgcagacaaatttgaaaaccacagctttgggaggctgaggtgggtggatcataagatcaggagtttgagaccagcctggccaatatggtgaaaccccgtctctactaaaaatgcaaacattagctgggcatggtggcgcatacctgtagtcccagctactctagaggctgaggcggaagcatcagtgagggagaatcagtgaacccaggatgtggaagtttcagtgagcccagatcacaccactgcactccagcctgggcgacagagcgagactccacctcaaaaacaaaaagaaagaaagaaaaaagaaaagcagtactctggaacctaccaatccatcatttagcatatttgtgaagtaaagtgttattctggtatttgcagaaccagaatccagctttattgggccaggcccaatttttttaaaaaacatggtaaggtctcccagccttaaagtattacatagcatagctctaaaagatcactgtaggaagacataaaatggtatttcagtcatctaagggaaaaaccttcctaaagcactagcccctggacaactattatttaaacatctacagctgttcaatagatattgggttctttttggagggatgtgacaaaattcttgtataattagattgtgatgatgattgtatcagtttagtacatgtaaatacactgaaaaccattggattatacactttaaatatgtgatttgcatggtatgtgaattatgtctcagtaaaaatctagagatggggctgggctcagtggctcacgcctgtaatcccagtacttagggaggctgaggccagcggatcacctgaggccaggagttcaagaccggcctggccaacatggtgaaacttcatctctactaataatacaaaaatcaggccgggcctggtggctcacgcctgtaatcccagcactttgggaggcggaggcgggcggatcacgaggtcaggagtccaagaccagcctggccaacatggtgaaaccccgtctctactaaaaatacaaaaattcaccaggcgtggtggctgaggcaggagaatcgcttgatggtggaggttgcagtgagccgagatcgcgccactgcactccagcctgggtgaaagagcgaaactccatctcaaaaaaaaaaaaaaaaaaaaaatcagccagatgtggtggcaggtgcctgtagtcacagctacttgggaggttgaagcaggagaatcgctttatctcaggaagcagaggttgcagtgagccaagatcatgctgttgcattccagcctgggcaacaagaacaaaactcactccatctcaaaaaaaaaaaaaaaatatctagagatgggagaatcatatggctggcataaaaaggtcaagtcaaagatatgtaagattaaggctttacgatgctccagttctagtaaaacagaccaggtacttgttttggtgtgaaattgccaatataagtatagtactgtacatattagttgtttagcttaggtaagtcttttaatctctttaaactccagtttcctcatctataaaataaagagaatatctactttgcaaacttgttgtgagagtgaaaagtaatgcatataaagtccctgtatggagcaagtactcaataactatttgttgaactaaaaatgataatactgatattcaccatttattagcatccctatgtgccagacactgtaaacaattaaaagttatcattctggtacccagagtacagtatgagacagacatgcaaaaaaaaaaaaaaaaaaagataatggagatctgcatagcataagatgcagtgggaccaaacgggaaaaaacacctaaatgagcctggagaaaggaagaaatgatagaggtggtgatgcttgagctatgatctaaaggttgagtagtagcttgtcagacagtaaaggggaaaggacagggcagggaggggccattgcaagaaattccatgcagagggattatggtatttcattatcactgaaccttaaactgtgtgtgtggccgggtacggtggctcatgcctgtaatcctagcactttgggaggccaaggtgggcagatcacttgaggtcaggagtttgaaaccagcctggccaacatggtgaaacctcatctctattaaaaatacaaaaaattagccaggtgtggttgtgggtgcctgtaattccagctacttgagcagctacttgagaggtcgaggcaggagaattgcttgaacccgggaggcagaggttgcaatgagctggtgtcaggccactgcactccagcatgggcaacagagagagactccatctcaaaaaaaaagtgtgcgtgtaaaacagacagtctttgtaggagatgaggtgaagcaagtaggcaggagttagatcctgagttacctttgggccaagccaaggagtttttattttattccatatagatgacagtcactgcagaaatttgaactgatatgcatatatcatgaggtttttttgttttagaaatattattctgtcagtcataagtgaagggactggggacattgggactggaggcaaagagatcttatctctttgcaatagtttgaaagctattgcaatatttgaagagaagattgataaatgcttgaaccagcacagtggcagtacagatggagggagctgactacaataaaatcatcaggacttgttgattgacatgatataggaagtgagggacagggatgagtcaaggctgatccccctagatcctgactaaggaagctgggtggttgacagtgccattcacagagacagtgaattctggcataaacacctaataggtcaggctggtttacacctccatcattcccatgggagaaggtatagaggggtgtgtgtttgtgtgtgtgtgtgtgtgtgtaaaagaacacagaaagccagattcctctttttgacaccagaatattggttcccaccatagtcaaaaggatattcctgaggatcgaggcttggaaaaatattggggaaggataagaactccagttgttgctgctttttttggcagccagtgtaacctaggtaaggacttggttgaattaagaaatttcatgtccagatcaggatggatttttctatttctctgagctctggtgtgtttcccactcagattgcaggtcgtaggtacctacggtgtgaattgtgttgtgtttctgtgcttgtgcaagggagtagctaggttgctgggaggtctggatgagggtgggggtggggtgagatcaagtctccagctccaagaggtcccctggggctaagtgaaaagcttgctcttttgaaatggtcttcgttggtaattaacaaaagatcaagaataccttggtgtcagataaagggaatttgtaggcacaatgctgttggtagctgatctcaatcattcaaggaagctattaaatctatgaacattagcattctgccaggtaaagagatctggtccttagcacctcccagacacactgattctttactgttttgaaacatctccctctcctggcttcctccaccccgcttccatactgtccttgaaatcaatgaatggtaatttagtgtatctagtgtatcactagcaaatgtctgaataagaaaggtttggtttccgctgtgtctcctgttacaatgagaacatgtactgcataaatttaattggctacgttaatgtgtaagccttttctgcaaagagatggatccgtttctgaatattctgcagaagggcagagttttgagtatatggcagtggttctaattagcagttgctccaatacaatcagactgagacggaagctactcatttagaatactggttgatgacaacactggcttgaacaaagtgaccactctccaatggctactctccctctcagtgggccgcaggttgctagggctcaggctgtggctgttttccccgccgaaaaggggcggggtcagtcggtgtgttaggaaaaaaaatgtatatatatatatatgttgtctgcctccccacagagataacaacccgtggaaaaacatgccgttgagcgggaggaaggcgaaaagataggctgggttttttggggggtgggggagcgtggaggatagggtgggctttttcccctccaatgctgcgacgcattaaccctgctgctgttgggacgttctctgctcagcctattggctgagcccgggagccgctgtctgccaatcgggtggtgaaaggcagacaaatctaccccgccaccagcaaaaacggcgcgtaacccttgcggcgccggccgaaccgcgccagagctggcgcggggaaagggagataggtgtctccagctgctgtggctgtttggggcgggtcggcttcatccgcgtctcaggagcaagtagagaattagcgggcggcagcaatgctccgcaaggtgagaagctggacagaaatctggcggtgggctacccttttgttcctcttttaccacctgggttacgtttgtgggcagatccgctacccggtcccagaggagtcacaggaagggacttttgtagggaatgtcgctcaagatttcctgctggatacggacagtctgtcagctcgcaggctgcaggtcgctggagaggtgaaccaaagacacttccgtgtggatttggacagcggagccctgctcatcaagaacccaatcgaccgagaggcactgtgtgggctcagtgccagctgcatcgtgcccctggagtttgtcaccgaaggtcctttggaaatgtaccgagcagaggtagagatcgtagatgtgaatgatcacgccccccgttttccgcggcagcagctggacttggaaattggggaggcagctcctccaggacagcgtttcccgttggaaaaggctcaggatgcagatgtggggagcaattcgattagcagctataggctgagctccaatgaacactttgcactggatgtgaagaagcgcagcgacggcagcctggtcccagagctgctcctggagaagcctttggatcgagagaagcaatcggactaccgcctggtgctgactgctgtcgatggagggaacccgccgagatctggcaccgcagagctccgggtatccgtgctggacgtaaacgacaacgccccagccttccagcaatccagctacaggattagtgtgttggagagcgcaccagcgggcatggtgctcatccagctcaatgcctcagacccggacctgggtcccagtggtaacgtcaccttttatttcagtggtcatacccctgatcgtgtaagaaacctctttagcctgcaccccactactggaaagcttactcttttggggcccctagactttgagagtgagaattactatgaatttgatgtgcgggctcgcgatgggggttctccagccatggagcaacattgcagccttcgagtggatctgctggacgtaaatgacaatgccccttacatcacagtgacctcagagcttggaaccctccccgagagtgcagaacctggcactgtggtggcacttatcagtgtgcaggatccagactcagggtcaaacggagatgtgagcctccgcattcctgaccacttgccatttgccctcaagtctgccttcaggaaccagttctccctggtgactgctggacccttggatcgagaggccaaatctagctatgacatcatggtcactgcttctgatgctgggaaccctcctctcagtacccacagaactattttcctcaatatttcagatgtgaatgataatccaccctctttctttcagaggtcacatgaggtgtttgttcctgagaacaatcgcccaggggacctgctttgctcccttgcagcctctgacccagactctggcttgaatgcgcttatctcctactcactcctggagcccaggaatcgagatgtatcagcttcctctttcatctctctgaacccccagacaggagctgttcatgctactcgatcctttgactatgagcaaacccagacactgcagtttgaggtgcaggcccgggatcggggcaacccaccccttagcagcactgtaacagttcgtctatttgtgctggacctcaatgacaatgctccagctgtgctccgtcctcgggcccggcctggttccttatgtccccaagcactgcctccatcagttggtgctggccacctaatcacaaaggtgactgctgtggacttggattcaggttacaatgcttgggtttcctatcagctcctggaggccccagatcccagcctgtttgcagtctctcgatatgctggggaggtgcggacggctgttcctatcccagctgacctcccaccacagaagctggtcattgtggtaaaggatagtggtagtccaccactctctacctctgttactctcttagtgtccttagaggaagacactcatccagttgtcccagatcttcgagaatcttcagctccaagggaaggagaatctcgtctaaccctctacttggctgtgtccctagtggcaatttgctttgtctcctttggctcattcgtggcactactctctaagtgtcttcgtggggcagcctgtggagtcacatgctttcctgctggcacctgtgcctgtctcaccagatctcgaaggagggaggggcttcccccttccaatgggatcctccgaatccagctagggtcagatgaccctatcaagtttgttgatgtgggaggccactctcatggctgtacacccttggcttctgcacccactcggagtgatagcttcatgatggtgaagtcacccagtgcacctatggcaggggagcctgttcgcccaagctgcccaccctctgatcttctctatgggctagaggtgagacctttgcaggctcaacaaatgcttgagggttattctgatccaggcatatggctaggccatgtcctagagagtactggcctctcagtaagtgcccatagtgatgtcaccatttttgtaagaggtaactatgtggtagacgctgtgctttgtaactgtttcgtgaattaaccagagttgtcacagtttagcattgggggcgggtcatgcctatatctgagtaagaaatgaaagtaattggtgatcaagagccaggctgttgtggaagcatgatgatggaatgtgggagcacaggaggctacagtgcacagggtacagtgcaccaggcagtcacttggacaaaggtggctgttttctctactcttcctgaaagaggggatcagattctgaagtaccttaactctaggttaccatttcccaagggattgaggggaaataaaatctttgtctcccagtatctagtacactgtgaagggacctctctatttgaaacatagagacagcagaaagaggagagaactaaaggaatagagaggcacgcatcagagtggtggcatagatcttttggtctgggtcttaggactcatatcaagtccctactggggatttgaactagatgcggtaaattggaaggttggggcgggttggtcatcacctttggaaaaaacagtaagtgaaatcacttatgtcagaaaactggtttacagttggctgattcatagaaacagccaccctgtgcatctttaagttgagttctcctgaatttggtgaaaccatgaaacctagaagccaagccatccatgcttggcctctgaccaccctcctgggtgacctgattcagccccagaaatgttcccctacccaaaaactgtaacactcattccacatttggggtctggggtgtcagaaaagctaagtcccatgtcagctgacattgagatttccgcaaagcattgctggagagtcagggcaagactttacaaggttcttactaatcttttctctcaccttagcagcattcagcaggatgggggagggtgggggaatacatgggctttgcctctcccagaaggacaagattttgctggttcaagcaaagtggtggaagcttctgaagtcatgcaggaagttgctgggacagaacgctgaggagttttgtatcactttgtcttccctgttgagtaccatctgagctgtcaaactttgctgccaagggggctgaatcaacctgcagcacgaagtgagtggggaggtaggaagcttctgtgacacagatttgcagcctgtgttcccaaggtttccaggattgaggaaactccataattggttgagagcacacagactttttggccaatcagactcagagctgaggtgggagatctgctcttccagcccgcctctcctcctccagctccccagctccactcaaattcagctcccctcccccctgcccacccccgccactcggtgactaagaactgctgcaagcaggcaaacctccgagcagtttttaagaggctggaaggagacataagagacttcagctgctgcattccaagccctgggtctaccttggagacaggacagcacagacttactctccacaaagggacttctgggtcatggggcccaagacactcccacagctcgctgggaaatggcaagtgctgtgcatgttgtccttgtgctgctggggctgggtgtctgggcagcttcgttactcagtggtggaggagtctgagccggggacgctggtggggaatgttgctcaggatctgggcttaaagatgacagatctgttgagccggcggctgcaattgggctctgaggagaatgggcgctatttttccctgagcttgatgagtggtgccctggcagtgaatcaaaagattgaccgagaaagcctatgtggagccagcaccagctgcctgctgccagtgcaggtggtgactgaacaccccctggagctaatccgtgtagaggtagagatcctggatctcaatgacaactctcctagctttgccacccctgagcgagagatgcgcatctcagaatcagcagcatctggggcacgattcccactggacagtgcccaggatccggatgtgggcaccaatactgtgagcttttacactctaagccccaacagccacttctctctgaatgtgaagaccctaaaagatgggaagccattcccagagctggtgctagagcagcagctggatcgtgaagcccaggcaagacatcagctggtgcttactgctgtggatggggggaccccagcccgctcagggaccacccttatctctgtcatcgtgctggacatcaatgataatgctccaaccttccaatcctcagttctacgtgtgggaatcccagagaatgcacccattggtactctgctgctccgcctcaatgccactgatccagacgagggcaccaacggccaactagactattcttttggagaccacacatctgaggcagtgcggaacctctttggcctagaccctagcagtggggcaatccatgtgttgggtcccatagactttgaggagtcacgtttctatgaaattcatgcaagagcccgtgaccagggacagcctgccatggagggccactgtgtgattcaagtggatgtgggggatgtcaatgacaatgccccagaggtgctattggcctctttggccaaccctgtcctagagagcacaccagtgggcacagtagtggggttgtttaatgtgcgagaccgggactcaggtagaaatggtgaagtgagccttgatatctctccggacctgccatttcagattaagccttctgagaaccactactcgctgctaaccagccagcctttggaccgggaggccacatcccactatatcatcgagctgctggccagcgatgctggttcaccttccctacacaaacatctcaccatcaggctcaacatttcagatgtcaatgacaatgcaccccgcttcaaccagcagctttacactgcttacatcctagaaaaccggcctccgggctcccttctttgcactgtggctgcctcagatccagacactggggataatgcccgcctcacctactccattgtaggaaatcaggttcagggagccccagcctcctcctttgtgtatgtcaacccagaggatggacggatctttgcccagcgtacctttgactatgaattgctgcagatgctgcagattgtggtgggggttcgagactccggctctcccccattgcatgccaacacatctctgcatgtgtttgtcctagacgagaatgataatgccccagctgtgctgcacccacggccagactgggaacactcagccccccagcgtctccctcgctctgctcctcctggctccttggtcaccaaggtgacagccgtggatgctgatgcaggccacaatgcgtggctctcctactcactgttgccacagtccacagccccaggactgttcctcgtgtctacacacactggtgaggtgcgcacagcccgggccttactggaggatgactctgacacccagcaggtggtggtcctggtgagggacaatggtgacccttcactctcctccacagccacagtgctgctggttctggaggatgaggaccctgaggaaatgcccaaatccagtgacttcctcatacaccctcctgagcgttcagaccttaccctttacctcattgtggctctagcgaccgtcagtctcttatccctagtcaccttcacctttctgtcagcgaagtgccttcagggaaacgcagacggggacgggggtggagggcagtgctgcaggcgccaggactcaccctccccggacttctataagcagtccagccccaacctgcaggtgagctcggacggcacgctcaagtacatggaggtgacgctgcggcccacagactcgcagagccactgctacaggacgtgcttttcaccggcctcggacggcagtgacttcacttttctaagacccctcagcgttcagcagcccacagctctggcgctggagcctgacgccatccggtcccgctctaatacgctgcgggagcggagccaggtgaggggctcggcgccgccccgggcgacccctgggggcggcactggagaagccgcccgtcctcataagggattgaacttgcatccactcctctccggccggcttggtcgctggctgcgctccacccgattctcgggatcattggaccgtttgcgcgaaaccagagtggccgattaagggatggggctccgagcaccgggggtggtggcgactgtgggcgaggggaggtgggaccgacccccacccctacactcaaaaaaggccggggcctccttcgagcttccggtgaatttcgggcgatttccgcgggtgtcgggggtcccgggaggaggcagtcacagatccacccctgcagccagcctcctaggcgccggctccggcacgcttcgccggtctgtagatttcctcttcgatttctccccagctcccagcatctgtgacttcactgttaccctccctatccccgcatcacccaaccgcacctgtctgcgggacttaggtgtgcgcgcggggctcatgcgtgtcctccctgctggccacccccacggcccacacaagttgcacgggctcgccacgccccgccaacacgtgcgcggacgcacgcacgcactcctcgcacgtgggcttacgcgaataccagctttcactgccactcgctcgcggccagattcacaggcctgttccggtccactcgcagctcccctctgccgctccctccgccgggctcaggagtactcgtagctgattgtgcgcgcctgagggtcccagatcgcggccgcccaggaccaggcgaggactccggagcctcctctcacctctcccacctgcgccccgggctgggccgggtcgcctggggggcggcctgagcgaggcgcggggccaggagcgctggagcgactgccgctctaagtgccgggcgggcaggactctacgatccttgggccagaggtccggatggtcccgggactccgtctcaagggtcggcgacccctcaacccagaagcctcgagcaggcggacaggcagagctgcccagtggccgaggcgcggcagggctccgcgttgggcgagtgagtgagcctctataggacagcaggactgggactccagtggcaccagcggccccttcctcccgcaggaagtgaaagcctcgagcgccctggctctcaacccccagagatacaggcttttggcgccgtcgtgatcacaatgtgcccagcgatctagggtcagagatttggaggtgaccaaactatctgacactctaacaagtcctgtctcctctggcagatggaaagctataggctctgccagatgccagggtgcccttatgtgtgaggaaactacaatagtaaaaaacacaagtttctccaactccaggagcttttattcaaaatatatcaatgcctaactctgctcctaggactgtattttgaaacacccccaggtgattttgatagctgattgagagaaacttactatataactcctttgagaacctcatctcatttgctcttcccaccattgctgttggctaggtactaacatgcctctcttataacagcttcacagaggtcaagtgacttgctcaagttcacagagcaagtaagagagattctaacccctgtctaactccagaatgtgtgcttttaatttcttggcacttggaactttaaaagcttgaggacaggagaggggagttgcctctgctgggattttgcttctgctgggatggggcaagggtggggttccttcccttttaggaccttacatgtggggaaagtcttctgtggctcctcatttctgagcagtccccgcagcgcaaacttggccagttatccttttggagattgagttcccccagctccgtttcctcctatcacaatcactgcatttccatgtagattctgctgtgtctaagaatacagtggctgagggctggccatccctgtgcccttctccatggcagccccagaatggtgctggtgactcccgatacacctggaatgctaggtttctgggttctgctcatatcactgccacctgtgagccttgagtgagccactggcagttccggagcttccttctccctggagtaatctgagatactcacactctctgcttctgggagcaagtatgagtattaattaccagcccaccccagaaccagtgaggaggtggctctaggagtgctccatgagagtgtgtgatgggataacacaccccctggaaagaccagaagggactcaggaatgaagtggctggccagagccccacaccttcagctaggtgggagatggctacacatcagccccttgggagccctggagacttagttggccctgcttggaggctgtgggagctggatccctccccgctgcatcccttccatttttctccgtctcagacagagcagccttgttctcttctccttagtcacagaccattgtctggcacggagttctaggggtgagaagtgtcccgggacttggatgccccgcaaaggcccaatctggcatgactcctaaattaataatgtatttagctgtgggaagagattcttgcaagccaagggcccagagaagatgtccctgtgaatgtgtcactgcacaacctggcaccaaaagggttaccaagaacagcagccatcttgctgcagaggatgctttgttcccagctgaggagttgaataaattcattctagggctggtagaattctcattgaaaagcctcctttgccactttagggggctttgtctgcacctcttcccccagttccacagaagatgccttcagtccttgaattttggctcaggagttctgactctgggggcagggaggaaggggccatttctttaggaaaggagtctcagcttgctcactgtggtcagatgaaatgtgatttatctcttggtttctggtacctcagacctctgagacctgaggtgtattttgtctttggagatgagtccacccctgccccctcttagtccgttttcttctctgtgcccactcccctccttctctcccggcccatccctaggggctcgggtgacattctaacttctcacgggtactcagcccctttccctctgttttctccacagcaagccccgcccaacacggactggcgtttctctcaggcccagagacccggcaccagcgggtaggtgactgattctccagcccaccctcttctctgcggcattttctcagggatgacgtgggaggagatgggggagggcccagcatttgctacagatggcttctccctcagtttgagatcccagggaggtcttggtgtgcggggggctggcacacagaccccggaaggaagaggcgactgccctgactgttcaggaagctcaattcacatgcttgccccttccctcctcgccacgaccggcaccttttcctatcccctgagggcactgtggaaccaaaggatggtcttaagctggtctctgggtgaaagcgaggctttctatgcccatgtactgcctaaccccctcccctgagttgagctgggctccattatgacctggggctcaggcagaaaagcatttgaccggaggaggcggtccgcactcagcgcctcctccagagcctccagagccgaggctgactgcagcctggggagagtggaggcagcacagctggaggtggaactgaggaaggactgggcggggcatggagcaggcccccttctccggcccctcctcccactgtcctctgcccctacttgtcctgctctctgtctgtggggtctccgtgtctctgcccctttttcttgagtttccgtctttgccactttctcttacctctcagtccttccctcagtctctatctcgctttgcaatctctgcctctccctctcttctccatctctgtcttagcttccgtcttgattgctgcacctcagcctcagtccctttcatttgtctacttgcattgatctgtgccgcccactgtgcctgccatggcataagtgctcaataaatgtggagtgagtaactacacgggacccttagtctctttctccttctctatctctgcctccctgtccttgtcctggacctcttttctgtttctcctttcaccgtttcctagcgccttgtgttcttctatccccagcctctatgtttctctgtctctcactatttctgctttcctctctgttctttgtctctctttgtctctgtctctgtatatctttctttgtctctgtctctggtctctgtgcctgttgtctttttctgcctctttctctgttactctttctttatctctctttttcttttatcttgtcttttttctctgagcctctgtctctgtctctcatttttttgtgcttgtgggcaagccagcacacacaaccccccacccaccacccaccaacaccccgctctcttccttccctgcccctcacacactgagcctttgatcgcagctctccaccagacaccctcccatccaagcagccccagctgctcatttcaatctggtatgaattcctgctgagacaggaaccccctgcgggctgaaggggagggaaacttcagcagaaagaccttcagttggtctgagcagagtgggataggctctgcgccaggcctcccagttagaagtcaggagcctggaggagtctcagagcccagggagagaagcaggagcttgggccaccttaccctacctcctcaatggttgagtacttgctgtccacatttgccaagttgctacagatgctgagcttccaagagttatctttcccccatcctgcaaccaaccaaacccttgttgccacaaggacccaggagcccttggtgtatggcagagattccagcttctgggcatgcacagtcctgtcacccattttaggaacgcaaagcgcttcttagaaggcccctaaaaagcagcagatcaaaaggcttgggctgcccttgcccttcctttgaccccagctgttgtccttctccctgctggccttgccaaccttctcataagttatccattaagtcattaatgtattcattcgttcatttattcaacaaatatttatcgagcatctactatgagcagggccctgtgctaaacattgggctataggagtgaacaagtagatgtgatcccagaactcataggcttccagaccagcagaggagactgaaaatttgcaacaagtaacacttaaaaaaaaaaaaaaaggctgggcactgtggttcacgcctgtaatcccagcactttgggaggccaaggtgggtagatcacttgaggtcaggggtttgagaccagcctggcagccaacatggtgaaaccccatctcgattaaaaatacaaaaattagccaggcgtggtggcaggcacctgtaatcccagcgacttaggaggctgaggcagaactgcttgaacccggaaggcagaggttgcagtgagctgagatcacgaaaaaaaaataatctagccacaaatcacagtaagttctgagaggcagagaacaatgtgagtgtaatgggggggggaagatcagagaaggcttctaggaggaggtgacattgagaagttctaggccatttatgttccctctacctaccaccaccccaggccatacactggctttgaagcagaattcaccattgaacctggaagccccaccaactgcctctcatgtgtcctctggggtgagcaccttacccctgcctcaactcccattccatcaaatgagaggcttagtggcctggaatacatgtgggagctcttggagatatggaggagaaggtgcggaacctctctctctctcctctctctgcttccttagttaacttgtggaggatgcaacaaaccttttttttttttttttttagacagagtcttgctctgttgcccaagctggagtgcagtggtgcgatcttggctcactgcaacctctgcctgccaggttcaagcgattctcctgcctcagcctcccgagtagctgggacagcaggtgtgcaccaccacacccagctcatttttgtatttttagtagagatgggtttcgccacgttggccaggctggtttcaaactccccgacctcaactgatccacctgcttcagcttcccaaagtgctagaattacaggtgtgatcgcccccggccacaacaaacatttttgattcagcggctccaaagtgaaataagcgttaggatctagtccagtaacttcaacttctctccttcattcattcaacaaatggtcagtgagcactttctgttggccaggcagtgttctcgatgtgggaggcccctgccctcaaggagtttacagtgcactgaaggagacaaatattgaccaaataattacaaaaataaatgtgagactgaaactgtcataagtgctaggtagaattgtatctggtggtgtgggcgtataatagggatttgatttagggagcaggaggacatcctggaaatgaagttgtgctgagatctgaaagacaaatacaaattaaccagctaaagaaaagaaggaagagcattccagatggtcaggcataccagcttcaaagcagggctggtgttgagttcttcagtaaacttggttcaagatcaagccagctctgggtcacactgcctacacagaaggaagagcattccaaatgggaaaagcctatgcaaaagccttgtggtgaggcctcctgggatcaagggaatggcagggagttttctctttgctggcactggagtgaggggatgaagaggagaggttccttttatccagtctaaccctggttccagccttctgttgatgccctgcctcactccctccccaccatcttgcccactgccctccagcctggtctggtcagacacaccagcttcaaagcagggctagtattgagttcttcagtaaacttggttcaagttcaagtcagcactgggtcacactgcctagacagaaggaagaagacctggccaggtgtggtggctcacgcctgtaatcccagcactttgggaggctgaggtgggtggatcacctgaggtcaggagtttgagaccagcctggccaacatgatgaaaccccatctctagtaaaaatacaaaatattagccaggtgtggtggtgcacacctgtagtcccagctactcaggaggctgaggcaggggaatcgcttgaacccaggaggcggaggttgcagtgagctgagatcacaccactgcactccagtctgggtgacagagcgagactccatcaggaaagaaagaaagaaaaagagagagagggagggagggagggaaggaaggaaggaaggaaggaaggaaggaaggaaggaaggaaggaaggaaggaagaaaagaaagaaaaagggagaaaaaatgaagaagacttacattctgaagttcctgcttggcacatgcttctcctccccaccactatcccttctcaggtcatcctttgggtgtctgatcccaatagctgttgtctcaagctctgagcccagcaaaccatttcccccttcttaggctgtaacccaggccctgccctgcagctgtccccagcctctgcacaaagagtctccatttggtccctagactgttctctgatggctccacactaccatccctcctctgagagacagtatccctgctctctctcagtttgggcagtcattcaacaaacaaatagcaacttaatttttttccacttataaaatagtacatgctcattatagaaacatgaaaaatagaaaaaaaattaaaaggaaaaccacccatcattttacaatctagggagaaccaccaccaactacagtttaatatgaaacatttcaaatatgtacaaaagtagagagaatggtgtcatgaacctgtatgataccactatccagcttcaactaatgccttatcttgtttcacctatatccctacccttatcctgtccttggattcttttgaagcaaatctcagacatcatataatttcatcttggtctccaccatctttaacagatgacttttttttttttttttttttttggagacagagtctcactctcttgcccaggctgtggcacaatctcagctcactgcagccttcgcctcccgggttcaagcaattctcatgcttcagcctcctaagtagctaggattacaggtgtgcaccaccacacacagctaatattttgtattttcagtacaaacagggtttcgccatgttggccaggctggtcttgaactcctggcctcaagtgatccaccctcctcggcctcccaaaatgttgggattacaggtgtgagccaccttgcccggccagatgattctttcataaggtccacattttatatttgagtgagtgtctcttaagtatcttaatgctcttttaatgtaaaagacttcccctccatcttccatttttgcaatttatttgttgaatccctgccttttcatatatatctttctaaacttttctttgtgtaatcaaagaacatgcatgagcttcatttttatttttatttatttatttatttatttatttatttatttatttattgatacgtagccttgctctgtcacccaggctggactgcagtggcgcaatctcggctcactgcaagctccgcctcccaggttcacgccatgctcctgcctcagcctccagaatagctgggactacaggcgcccactaccacgcccggctaattattttgtatttttagtagagacggggtttcaccgtgttagccaggatggtctcgatctcctgacctcgtgatccgcccgcctcggcctcccaaagtgctgggattacaggcgtgagccaccgcgcctggccgagcttcattttaaaaaaatctcattcacctaaataagttgttcacaaacttgtcacactttcatgtgacactttattcacatattaagaactgttattcccagtcatacggtacatttcctactagttttttaaaaatagcaactgaggccatactgtccaacagaattatagcttttttcttctttgcagtgtatcatgagaatttccccatgtctttcaaaattcttcccaagtcatttgcagagtaactcctcttatgaatatacatattattttacagaataagtcctcatatgaatatacatattatttttctaatgctaatgggcttttgctacattagaaaacatacacattcatttacaattttttttttttgagacagtctcgctctgtctccaggctggggtgcagtggcgccatctcggctcactgcaagctccacctcctgggttcaagcaattctcctgcctcagcctcctgagtagctgggactacaggcacgcgccaccacgcccagctaatttttgtatttttagtagagacggggtttcaccatgttgaccaggatggtctcaatctcttgacctcgtgatccgcctgcctcagcctccctaagtgctgggattacaggtgggagccaccatccccagcctcatttacattttaacacaattaaattcagggtgttgtcagggtgacttcctagatttctcagttttttgagcatgatgtagggagtattttattatagtccagtctatgggatattcccttatacacacacacacacacacacacacacacacacacacacacacaccccaaactcaatagggcaagaaccatattcatcatctcttaaatcctaggtcctgtcacaggccactgcttggaaaatagttgactaaatgtagtccatttcttccatttttacttttcactattccccaaatcctggaagagtccctcatatctgctgctggggctccaaggcctccaagctgaagcccagtacgttgttgtgcataagatcataggccctggaatcatattaggctggctttcaggttgcaactctaccagttccagctgtgtgactctggtatagtctctcaacctctctgagccctgttttcatctgttggaaaatatagataatcacaacacttatctgcagggtgattccgaggataaaaaagacaaatatattacccagtcagcttagaataggaagctctcagtaaatggttaaaaaagaggtctctctccctctgctcatctcttacccagcttcacataattggcagcccacccacctgtttggccctcaaccttcaaccatttcccaggacgcctccttacactcctgatcatcatggttccaaccccactgttccactcagctttgttccctcaacaccactgctccctgtgacaggtcatcctcctaacctctggcatctggtcccgttgtctccctgacaacccgcatgctctcctccctgcaacccccgccgcttgcctgctctccctactttattcccattagcccccttcacctggggctgagaacacctggccttgaccctgcaccctcagccaggcccacagagctcagtcgggccggaagtaaggaccccagatattcagttgaggaatttaacattaatacaataatatagaatccaccagcagattttcataaatgttctgtgtgttcttttatccttttttttaatccaggattttatcaaggagcatagattgcatttggttgtcacgtctttcctctcctttaatctggagccagctcccagtctttttatttttttaatgacatggatatttttaaagagtccaggccagttgtactttaaaatgtccccgaacctggatttgctggctattctctgatggttagattcagattacacaccttggtaggaatacttcccgcagcatcacactgggactcatctaacgtcggcctgtcccactatcagtgatgccgagtttgttcgtgtggtaaaaacagtgtcccagatctctccattataaaaatatatttttataaagatattttaaaatatttgtgaaaatataagtaatctgtggatgatactttgagataggcagcaacccttcatgcaattttagtattccctgatgatccttgcctgtatctgtttttacatcagtgattacaaagcggtgatgttctgtcattccttctacatgtatttgctggtattcttctgaaaattacctggatgatttcttcagatttaaattcactgtcttttccttggggaagcctggactggctgagctgcctaaccctgactctctgtcttttttttttttttgacagggagtctagctctgttgccaggctggagtgcagtggcaaccttcacctcctgggttcaagcgattctcctgcctcagcctcccaagtagctgggattacaggcgtgtgccaccatgcccggttaattttttttttttaatatctattttagttgagacagggtttcaccatgttggtcagaatggtctcgatctcctgacctcgtggtctgcccgcccctgcctctcttcataccctctggtagcccctgacacagcccatggcaagtatcacaattgcaattactctattgtgtaattatttaaaatcagcctctcagtgcccaccatgagcaccgtaaagatggacagtttctatcatactcacagccacaaccccagcacctggctctgtgtctggtacatagaaattgctcaagaaagaattgttggaggggcgcggtggctcacgcctgtaattccagcactttgggaagcggaggcaggtggatcatgaggtcaggagttcgaaaccaacctggccaatatggtgaaaccccatctctactaaaaatacaaaaattcgctgggcatggtggcatgtgtgcacttgtcgtcccagctgctcaagaggctgaggcaggagaatcacttgaacctgggaggcagaggttgcagtgagccgagatcgcgccactgtactccagcctgggtgacagagcgagactccagctcaaaaaaaaaaaaaaaagaaaaaagaaaagaaataattattgaatcaatggaaacagaattacaactcttcccacttttgggaaggagaattgagattcctgctttccccttcaaccctagctttatgtttgttgtgatggtatagaggtcacacatggcagccttgtgtctgttcttaggctgagttcatctacttagggacggggaatcccagattgggcaaaaccaaaagcagggacagaccttggaaaaattgtaaagcagttcttggttgtgctcacccaccatgacaaaatatgcacacacacaacgcaacacacacacagacattttcatgccttcaaggcctaccctacagcctttcccatggtgccaaacccttcttcttaccttacagtcacttaactgtctctgctggtctcttcccactcatttaggcaacaaatatttattgaaaaacttctctgagccagatggtgccaaacagttacctaaagggcagactgtgtgtgtgccagggctgtttcccgccaacactcccctgcaaattgaaataatttcatccttggaaattcaaaaaaatcatgaaaattgtcactgtgggaaaattccaagtagagctgaaccttctaagaagcagagagttcttcttatggtttagtatttttttaaattatgaatcatttcatgttttttcaacactcggagtttctaaaagtctcacttaggtccaagtgctaggctttgtgctaggtgcttcagtaggaagcaggtggagtcgctgcctcacagaagccagtgtggtggaggaacagacaggcactacaacagctgcagtgtgactagtgccatgtggggcagccgctgggatgggagtacagtggaggcacctgcccagtctgagtggatctcctctgatatattttattcgtgtcatcatggcaaatgttgggggactggcattctagggaacaccatctgcccaggattcacagcaagagggaacttgagggataggaaagtgcaccttggaaaaggtttgatgatagagtgtttgagggcggggggtgggggttcttgtaaaataggaggggcaggttcttctatggccgtggattttactctgagggcttaggaagccattgaattttagaaatttcttctccctgctccagggtctcttggggcctcctacatctccccctaggtacctcctaggtccccactttttctctagctctggaacattctcttccatttcccaccttcacagtcctctggagaaggtctgatctccctcactatgacaggaagccaggctctctcatggtgggtgggggaatgcactatgttcaatgcattggaccagcctggccaacatggtgaaaccccgtctgtactaaaaatacaaaaattagcctggcacagtggcaggtgcctgtcatcccagctacttgggagactgaggcaggagaatcgcttgaacccaggaggtggatgttgcaatgagccaagatcgcgccactgcactccagcctggatgacagagtaagaccctgtctaaaacaaaaagaaaaaagcatcggaggcagcaaagagctggtttgagggactgacttgtgggattctggcttctgaaggattgtagaagtgcctcctaccttgctgagagaaacaggtcttgggcatggggtagggttagggtactaggtttgggagccctgggagaggacaggaggggcatgagctgtgccggcctgggagtctgtgctcaccatcctactctctccccagctcccaaaatggcgatgacaccggcacctggcccaacaaccagtttgacacagagatgctgcaagccatgatcttggcgtccgccagtggtaagtggtgtcagtgtgtgtatggaagagtgggagacctggggttctggggtgcatctcacagccaccatgcccacggactggatgtcaaacctgtgtagtttctccagatctttcggcaggtctgaaaggacccacaattccaaacataaagcctggaattgtggctaaggaacagcagaggggttgggggtcctgggatgcctggaggagagcgaacaaggaaaagactcatggagggaatagtggttacaagtctagctctggaatgggacagtgtagctcaggtcctagctctgctactatccttgggacttggatcgacttgctcaatctctctaaacctcagtttcctcagcctagaaagtggggacagggaccccaaagggttgttgtagagattaaatgagatgataccacaaagcatagagttctgggcctggcgcttggaagccctcaagcaatgaaagtgggtgtagaaatccccagccgagagaacacctcctctttatgcgaggctcctcttttgctgcccctaactccagagtaggattctggttttcccataaggttgactaagggcttcctttgtaatagagattcggctagtggtggttgtccctgaagagtcactagggcccagagcaggagaagaagaatatcatttgtccttaagagcacagcctaagctgggcgtggtggctcacgcctgtaatcccagcactttgggaagctgaggcaggaggatcatgaggtcaggagttcgaaaccggcctggccaacatagtgaaaccctgtctctactaaaaatacaaaaattagctgggcatggtggtgcgtgcctgtagtcccagctacttgggaggctgaggcaggagaatcgcttgaacctgggaggtggctgtggtgagcagaaaatcgcaccactgcactccagcctgggcaacagtctcgctctgtctcaaaaaaaaaaaaaaaaaaaaagagcacaggctttagaggcaggccaatctggattcaaatcctggcacctggcaccaccacttagcaatgagtccttaggtaagttattaaaccccctcggtttcacttactattaatgggcacagtattaacggatctcattgtggtgttaccagggccaaatgcaagtccctcagcacaggattggcagagagtaagggcacaatatattattatctttgctgacccaaacccgttttttactgggtagaaagcagaattagaataatgcctattaataaagactagcttctggagcagcaaatcctgggcttataaggaggctggcagaggatcaaggcattgccctatatcatgaactgatagccctgccctccagcatgtctggaggactggtgggtagagaaccaggtgaaatcacaagaagcactgtcatcacacctgggcacatactaaacaaactttaggggcctcctgtcaatgaatcctctcaatagctctgcaaggcaggtctgatttctcacactcgacagatgagagaaccgagaaggcacttgccccagggtcctcagttttgagctgccaagctgaggttctaacctggctcaactcctaagtttatgctctttctactatagggaccatggctgcctttggatccagcctcggcttctctattacctgagcaggatgagaggctgtcctcttcctcgagctctgctttattcttccagatcagggttgccagataaaatacaggatgcccagttacagttgaatgtcagataaacagcaagtactatttcagcataagtcagtctcaaatgttgcatgagacataatgtactaaaaaaaaaaatgctcattgtttacctgaaattcaaatttaactgggagccctgtacttttatttactaaatctggcaactctaccccagatgtctgtgaggttaagtggggccaggcctacagctgacggaaggacagagagagaggtggcagggactgctggcctcctgaggcagagctgtcccaggtctggtggggctatgattccagagaggccagagactgagtatgaaagtggcaggcggctgggtctgaggagatgccaagttggcctcttgagggaaataaacaggtatatttagctgttgtggccttgcgccctgaggccaggaagcagctttttagcctaaatccagatgttaaaaacagaaatgaaatcagtatttatggccccaaaccctccaagcaagtcatgcagctcgttcccctgtcaaggcctcccacctttggcccacacagggcctgaccctcgtctaagcctgcgccctggggaacggaccctgggggtggaggtggtgggtcaggccctgctctcactttcacacccgcttcctagccctgaaaccagagaggttcctgaagtccagcccagccaggcctgtggggctgctgagaggggttaagtaagagggagagtaaaaaccgacacttgggaggaggcttttaaaataaacatctgcggggagggatgctctcaaggaggctgcggtttgcagctcagccagctgtgttccagctaatcagcctccttgggctactctggagttgctgccttggccctgggatggggtaggttaagaggacagagggaggtcagggagctgggggctgagtttccctgagtagaggctggcacaggagagaaggcatcacccccacctcgtccaggccagaagatgtccagcttcttgaggctctcctaagtctgcctctcctgggaccaagagaaaatcccggtccttgaccaaggtgggccttggggggagtggggtgtagagggaggggcactggagaactgactctacagaaagtcaaagctggcaatccaacttcttcccctcagatttatagatgggaaaacaggcttgagccacgcagagacttgaccaagctcacacagttccttagtggcagagcagagcaaatattctctttcttttacattctggatttccatatcttctctccctcctggtccagcccaacctcagggcaccccccacgaggtgggcgggggatggctttgtcacttgcacccactcggggtgctactcagagatcttgggtgcacataggacgtgggtgggccgagcttctagctactccgtcaggcccttcctgtcattctgtctctgcctcccttctccctgcttctccgtgttcctcctcattcttttctgtgtgcagggagactacaccccccaccccgctctttctctggcgcctctgaggtcccccctctagcccctaaatcactctggaatcctggctctttgaagccagatctgggcccccctcccctaccccttccattcccaggctgggaaaggctgaagaggctgacggctggaggggagggggcggggcggtggcggatctggcttccttttggagttaattagggaaaacagagaaatgtcagcggaatgaaagggctgggggtgggggccagctggggtaggagaggaggaagtgggcagctgctccctcccactcaacccctctcccccgcccccagaaagctctcagctccggggatttgcgacatgaaatgggggctgtagaaacctgagcgctggtgcgtgaagagaaaaaccgaggcgcatcccggctctcccctcccgtgtgccctcctcctcttatgccggcttgaaaatatttcctgtctctctatttctcaatccctggttgatgtcccaggattactcagcctctccggctttagtcactctcgctacccgctcccagggtccagggtggaggcagagggaggctgggagagaagctctactgccagctgggcctgggctggcctgggcatccctgaggttttaactgtctcctaaccacagaggatctcagggcctccagcagcgagccccaatgagtcaaactcttgtttcctcctctcccacccccgacccagtcagggcaggtgaggggtagaggtgatggcatgctggatgtgacggtgttgatgatgtattgcacaggatgaagcaccatctcatttagtcctcacagcagccttcacagtgcgtacaaatcagctggcaattccgagaggctgcattctaaacaagttcctgggtgatgctgagccagggccagagtgtggacttctctgggccccagtttcttcttctgtacagtgggacgttggactggaggtgctgtctgatgtcacctagctgtggcactctgagcctgtgcctaaagtgtccctgagatgtctagtccccgagatcatcatctcctcagcttcatagagccgagctcttctccatcttctctctacctcccattcactcagaacagggataaggtccaagctgctggtggtgatggtgactgactgtcccttccagcatgcgcttaggtacacttgggcctgaatgcccctctaacaaatgctaccgggtatggccttggtccttctaacacttggttccctcatctgtaaaatgagggtcataccacatagctggctgggctgttatgtagaggttaaaagtgattgtgcatgtgaagcatccagcagagtgcctggcacacagtaggtgctcaaatgctgttttgaaatacaaaaattagctgggctagtggtgtgcacctgtaatctcagctactcaggaggttgaggcaggagaatcacttgagcccaggaggcagaggttgcagtgagccgggatcgcgccactgcactccaggctgggcgacagagcaggactccatcttaaaaaaaaaaaaaaaaaaatgctgttttgaaatggaggcttggaagagcactcttcacccccaccccacacacttactaacggaactaccgaatctctactcgtgccaggccttgcttggcaaaggctaggggcatgtaaagccatggtttcatggctgctgccctccaggagcccatggtctagtgtgggagtcagaggctcccttgagaaagccagggcaaggaactgagagcccgtgtcacagccctgagagaaataccagcgaatgtgttttgagcacttacatctaccaggcactattttacgtacctgacatacattttcttatttagcattcactaaaaccagaagaggtggttaccattatcatccccattttgcagatgagaaaactgaagtggcataaggaggttaggtagacttgcccaggatcacagtgagtaaggaaaggagctaggaatcaaacctagactttctcactccagagcctcttaacctctaccctcaactcttgtgaagagagactaccttggtgacccctatattcccagtgctcagcgtggtcaaggcccagggtgctgtataggcattcattaactgctggggatataagacagtgactgttgaggaccctaagtttagctcccacctgatcttcctctgtctctgcagaagctgctgatgggagctccaccctgggagggggtgccggcaccatgggattgagcgcccgctacggaccccagttcaccctgcagcacgtgcccgactaccgccagaatgtctacatcccaggcagcaatgccacactgaccaacgcagctggcaagcgggatggcaaggccccagcaggtggcaatggcaacaagaagaagtcgggcaagaaggagaagaagtaacatggaggccaggccaagagccacagggcggcctctccccaaccagcccagcttctccttacctgcacccaggcctcagagtttcagggctaacccccagaatactggtaggggccaaggccatgctccccttgggaaacagaaacaagtgcccagtcagcacctaccccttcccccccagggggttgaatatgcaaaagcagttccgctgggaacccccatccaatcaactgctgtacccatgggggtagtggggttactgtagacaccaagaaccatttgccacaccccgtttagttacagctgaactcctccatcttccaaatcaatcaggcccatccatcccatgcctccctcctccccaccccactccaacagttcctctttcccgagtaaggtggttggggtgttgaagtaccaagtaacctacaagcctcctagttctgaaaagttggaagggcatcatgacctcttggcctctcctttgattctcaatcttcccccaaagcatggtttggtgccagccccttcacctccttccagagcccaagatcaatgctcaagttttggaggacatgatcaccatccccatggtactgatgcttgctggatttagggagggcattttgctaccaagcctcttcccaacgccctggggaccagtcttctgttttgtttttcattgtttgacgtttccactgcatgccttgacttcccccacctcctcctcaaacaagagactccactgcatgttccaagacagtatggggtggtaagataaggaagggaagtgtgtggatgtggatggtgggggcatggacaaagcttgacacatcaagttatcaaggccttggaggaggctctgtatgtcctcaggggactgacaacatcctccagattccagccataaaccaataactaggctggacccttcccactacataatagggctcagcccaggcagccagctttgggctgagctaacaggaccaatggattaaactggcatttcagtccaaggaagctcgaagcaggtttaggaccaggtccccttgagaggtcagaggggcctctgtgggtgctgggtactccagaggtgccactggtggaagggtcagcggagccccagcaggaagggtgggccagccaggccattcttagtccctgggttggggaggcagggagctagggcagggaccaaatgaacagaaagtctcagcccaggatggggcttcttcaacagggcccctgccctcctgaagcctcagtccttcaccttgccaggtgccgtttctcttccgtgaaggccactgcccaggtccccagtgcgccccctagtggccatagcctggttaaagttccccagtgcctccttgtgcatagaccttcttctcccacccccttctgcccctgggtccccggccatccagcggggctgccagagaaccccagacctgcccttacagtagtgtagcgccccctccctctttcggctggtgtagaatagccagtagtgtagtgcggtgtgcttttacgtgatggcgggtgggcagcgggcggcgggctccgcgcagccgtctgtccttgatctgcccgcggcggcccgtgttgtgttttgtgctgtgtccacgcgctaaggcgaccccctcccccgtactgacttctcctataagcgcttctcttcgcatagtcacgtagctcccaccccaccctcttcctgtgtctcacgcaagttttatactctaatatttatatggctttttttcttcgacaaaaaaataataaaacgtttcttctgaaaagctgaacgtttctgtataagcgatggaagctcctggcatgtgtgcatgaagtgatgagctgaggtgggtgctggaagaagggcggaatcgggaggccactttgtgtcattgcgcgtctagatgtttccgaattgcgtgtgtgtgtgtgactgtgcaatatggttgtgtatgcttgcaatgccgttgtgcctatgagacagtgtgcgattgtgtgcctatggatctgtgtaccgtgtgccattgtgtgatcggtccgctgtgggggtggggatctgagtgcggcgtgtcagtgtgcagtggagtgtgcagtctaagcttgcggctgtctccaggcagaagaggagaccccggcgcgggcgggggcgggttggcgccgggcaaacgccttgggtagaggggagaggacgtttcgttagttcccgccccttcctgactaaaattgcctacccgaagcgccccggagggcttcacgggaggagggtagactctcctttgcccccgcacccccacccccgctgcctaggggttttgggaaagccgcgggagtgggagggaatgcgggaggtgattcttccaaagccaagtctgcagctcgagcctcagtttccccatctggaattcgccttcccgctgacatctccgtagcgaagcctaagaaattggagggctcatcctcttcttgcgggggtcaaggggactgaaaggacgtgcaggaaatgagatccatcgcagactcagctcccctccctccttcctgtcggtgcttttccactcactcgcctgctctcccatctccccgccccctccgcctgcctcctcgaagcactgtgggattccgaggttgctgcagccagagaagctgcagaaaaacacggagctgggggtgaagggggacttaaaaggggaactacccggaaggacccaagaacacaaagacagagccactgcggttatctggctggtcagcaagggtatgcggcttcctccgcgctgcggaggctcccagagccaggtcacccattctgccagctcaagtctgttgtcatgggaaccaaaccttccaacttaagaatctgggggcgactttctagcgtgggaggaagggtggtgtgcacggttgctgagatggaagcagggttttgttactcagagccaggctgcggaggggcggggtgccgggcgcctgggttctattccaggcacagcagcagactggcagagcgcgtgagcagctgtggtttgtcccctaattggtatgtgtgcctataaagctctgaaccagaaaggcgtggcctccggggggacgggagggaggcggcaggcaacccatccccacacctcaggccatactgaggaggcagctgcccaggctccagggctatttaaaaggcttttatttccagttccagagcccgcccgaatgggtttgtggtcctctccaggcctctccctgtctatcctgggcctgctcattgctggtctggcttttttgtgcaggtcataacg

SEQ ID NO: 440 - DNA, 102805 bp, Homo sapiens
  source 1..102805: mol_type = genomic DNA
tttgagaccagcctgggcaacacagggagactccatcgctacagaacatttaaaaattagcagggtgtggtggcacatgcctgtggtctcagctactctggtggctgtggtgggagaatcgcttgagcccaggaagtctaggctgcagtgagctgtctaggtgacagagtgagaccctgtctcaaaaaaaaaagacatttctaagaaataaatgaaatactattgcctttgcactcagtctctgtctctgattctctgatagaagatttttgaagaaaaaagataaaatctttgaagagttctatacttggaaggcatagtgacataaacacttctgaacatcctgttctctgtgtgaaagaagtgaacttctataccctttgcatttgagggaacaattgctactgggttgatgggcacacacagttgaagatatgtgaaccactggactttggcctctgatacaaactgcctaagagaagagattatttatactggtattaatgctctgatgaaaacaggtcatttgacataaacacttacttgttaaaaacctatatcactacatctaactttgttttctaaaacttttagtacttcaaattctacgtatttcttttctcattacaatgcaaacagtttaatttgcaactgtaatatatgttcattttagtttgtgattacctgcttaatcatttaaataggtccatttaacttgtatccctgtaagataaagtatgttttacacaaaaaggttaattaaggctcagtaaaactattctagaagagtactttaaaaacctcttacacaatcctaagctaaataagtttaatgaattaagtagttacaattataaagcttcagagtgaattatctcatgagtttatttaatataatctttgtatgaatgtatactaaataaaattggcctattcaaatcacaattttaaattataagacttttctgaatttacctagacactaatatgacctaaaataagtattatttaccttttattaaagtgtgtacatttctgttgggaaaacgtgttgcaaatatatatttaaccaaacattatcttgaaatatttacaatattttcactccactttatcacacctcccctaagaaacctacatatagtaaattatttaaagataggagtggagaaaccaaagaatctatgtaaaatataataatccaacagaatagtttactttccattgcatgtatcacttgggtgcagtaacttcttaggactctgagcgccgctgttcacctactaggagagaaaacgcagccagagctcaatccggattctcagggcttcaactacacaagccccacaaaccggctgctgggctgcagggaagctcactccagaatttaaagtgcccaggctacagagacaccctgaagccacagaaagacaaaggaaccggttgaaacacacaacgtgtccagtgaggactttgcagaattctgtaaccagactacaatggccgctcaaaggaatcgctcaaaggaatcaaaggattgcagcgggctggtcctgctctgccttttcttcgggattccatgggaggctggagcccggcagatctcctactcaattcctgaggaattagagaaaggctctttcgtgggcaacatctccaaggacttgggtctggcgccccgggagctggcggagcgcggagtccgcatagtctccagaggtaggacgcagcttttctctctgaacccgcgcagcggcagcttgatcaccgcgggcaggatagaccgggaggagctctgcgctcagagcgcgcggtgcgtggtgagttttaatatccttgtggaagacagggtgaaactttttgggatagaaatagaagtaactgatatcaatgacaatgctccaaaattccaagcagaaaatctagacgtaaaaattaatgaaaatgtcgctgcgggaatgcgttttcctctcccggaagctattgatccggatgtgggcgtgaactccctgcagagctatcagctcagccccaataagcacttctccctaagagttcagagccgtgccaatggcgtcaagtacccggagctggtactggagcactccctagatcgcgaggaagaggccattcaccacctggtcctcaccgcctccgacgggggtgaccctctccgatctggcactgtccttgtcagtgtgactgtcttcgatgcaaatgacaacgcgccggtcttcaccttgccagaataccgagtgagtgttcctgagaatttgcctgtgggcactcagctgctgacagtcacagccaccgacagggacgaaggtgccaatggagaagtgacatattcattccgaaaattacctgacacgcaattgttgaagttccaactaaacaaatatactggagaaataaaaatatcagaaaatctagattatgaagaaaccggtttctatgaaatagaaatacaagcagaagatggaggagcatatcttgcaactgcaaaagtgttgattacagtagaagatgtaaatgacaacagtccagagctgaccatcacgtctctatttagtccagtgactgaagattcacctctgggaacagtcgtagcccttttaaatgtgcatgatttagactctgagcagaatggacaggtaacctgttccattttggcgtatctaccatttaaattagaaaagtccattgacagttattacagattggtgatacacagagcccttgacagggaacaggtatcctcttacaatatcacagtgacagccacagatgggggaagtcctcctctatcaacggaagctcactttatgctacaagtggcagatatcaatgacaacccacctaccttctctcaagtctcctactttacctatatcccagagaacaacgccaggggtgcctccatcttctcagtgacagcgctggacccggacagcaaagagaatgcccagattatttactccctggctgaagacaccatccagggggtacctctgtcctcatacatatccatcaactcagacactggcgtcctgtatgcactcagatccttcgactatgagcagtttcatgagctacagatgcaggtgacagccagcgacagcggggatcctccactcagcagcaacgtgtcgttgagcctgtttgtgctggaccagaacgacaatgcgcccgagatcctgtaccccgccctccccacagacggttccacaggcgtggagctggcgccccgctccgcagagcccggctacctggtgaccaaggtggtggcggtggacagagactccggccagaacgcctggctgtcctaccgtctgctcaaggccagcgagccgggactcttcgcggtgggggagcacacgggcgaggtgcgcacggcgcgagccctgctggacagagacgcgctcaagcaaagcctcgtagtggccgtccaggaccacggccagccccctctctccgccactgtcacgctcaccgtggccgtggccgacagcatcccccaagtcctggcggacctcggcagcttcgagtctccagctaactctgaaacctcagacctcactctgtacctggtggtagcggtggccgcggtctcctgcgtcttcctggccttcgtcatcgtgctgctggcgcacaggctgcggcgctggcacaagtcacgcctgctgcaggcttcaggaggcggcttgacaggtgtgtccggctcgcactttgtgggcgtggacggggttcgggctttcctgcagacctattcccacgaggtctctctcaccgcggactcgcgaaagagtcacctgatcttcccccagcccaattatgcggacacgctcatcagccaggagagctgtgagaaaaacgatcctttgtctttgttagatgattcgaagtttcctatagaggataccccattggttccagtgagttttattttcatttttacttttgttaaaaaaaaaaagattggtttttactttgaagtttgcggcatgatggtggaaagtgtaaatgctaaaacactgatgagtagaatttgatgtttattaaggttttttttttttttttttttttttttttttttactttctggtaaaattcacctagtctcaatcaaggcctatatatcataaggctttgttatgattagctttgcagaaccttgtagtttatagtgttgttgagtacaatattgacaattcctaagacagacttccatacagaagtgcctgtcaatttatatttcctcctgggtggtcacatattgaaactccagccccttaagcaaccctcttgttctgaaggcaggtctggtaagaataggtaagtatcagaaagaaatcacctctggaaacacaacccaaatccaagaatactcaatgcagttcttcccaaggagaagggcaataggcctttttcaaactacattttatatatttttcaatctatactttgtggtgatagttgcagttgaatatactaagtttttcattaatattgaattaacaatttatttataacaatgtatgcttagatttttccagccctatttataactgataacactgcagtatcctttttgcatacaattctctaatttcacactgctatgtggaagatatagcattttaatttaactttcattgctcaatagggatcctgaggaggctatagagggtgaaattaagaatatttgggattctgcttttgtcttttttgttaaattttctagtgactaaggctgaaagtaaatatgggttgggaagacagataaatttgtacatgttcccgagaacaggagcaagagatatatgacaaagctatttcagtggctctttaatgtataaggaggcaaacacctgaaactctgaaaactctgaaattgagaggcaaaataaacttagagtcaagaaagaaatgccatttctgcagatcagaatataaacaccaaccacagctgtaaaaaagaaaagaatatatgcaacgaagggaaattatataaacaaaggatcattggaggtactgatgagttcatttagttcaatgaaaatagtgacgtattaggtagatctcttaattttattactagtattctactaaatgtggtagtataaagtcaaaaagcattccgaagtttctcaagacccttataattccatgatttttttcaggtcagtcaacatttgttgaatgataggtctgtggaaggaaagcacactctttagggtcatagttattaactattaaaccattgaaactattattttatatttgtgttaatgagagtcaaaattattgtgcattcatctcaaataattctattattttgaaaaatacaggttttttttttaaaaaaaactgctcttgacattgtagctattgtgagaaaatattttgattataattatttaaaagcaatacaggacaccctggatgatggtaatgactagggcaatggttgcattccagtacttaagtatgaaataaggaattattactttctgggtgaatataggctagaattgaagacaaaaaaatttgttgcttatcttcagtacttccagcttcatagataattactcttaaaaggaacaagaatgactgcctctggatggaggaattggatagcaatgggccgtgggataggagacctataaaccttcatgctatattattttgtgcctttttaaattttgaagaaaaaatattcatttattcaagatatatgtaaattcagtaaataaaaagatatgatagttatgaccaagtggaaatatatttcctgatgtaaaaggaatcactgaggaaaaagattaaaatattttggctgtcaactcgtagtttaaaaaaaattccttgaaagaggtagagaaaagtcaagttgcagtcccacacagagcctctgggcgccgccgtcggccagtgcagagcaagcgctgacgccggggatccctcagcctctagcctgggattccctgcgcagccaacaacagaaaagaaaaccagctcccacacagaggctcccggctgcgcagaccttgcccagcacaccagattgccagctccgagacccgggactcctcctgtcctgggccgaatgctcttttagcgcggtagagtgcactttctccaactggaaaagcggggacccagcgagaacccgagcgaacgatgggagggagctgcgcgcagaggcgccgggccggcccgcggcaggtactatttcctttgctgctgcctttgttctaccccacgctgtgtgagccgatccgctactcgattccggaggagctggccaagggctcggtggtggggaacctcgctaaggatctagggcttagtgtcctggatgtgtcggctcgcgagctgcgagtgagcgcggagaagctgcacttcagcgtagacgcgcagagcggggacttacttgtgaaggaccgaatagaccgtgagcaaatatgcaaagagagaagaagatgtgagttgcaattggaagctgtggtggaaaatcctttaaatatttttcatgtcattgtggtgattgaggatgttaatgaccacgcccctcaattccggaaagatgaaataaacttagaaatcagtgaatccgtcagcctggggatgggaacaattcttgagtctgcagaagatcctgatattagtatgaattcgctgagcaaataccaactaagtcctaacgagtatttctcattggtggagaaagacaatcctgatggtggcaaatatccagaattagtattgcagaagactctggaccgagaaacgcagagcgctcaccacttggtactgaccgccttagatggtggggaccctccccgaagcggtactgctcagataagaatcctggtaatagatgccaatgacaaccccccagtgttcagccaggacgtgtacagggttagccttcgggaagacgtgcctccaggcacctccatcctgagagtgaaggccactgaccaggacgagggcatcaactcagagatcacttattccttctttggtgtggctgacaaagctcagcacgtgttctctctggattacactacaggaaacattctaactcagcagcctttggattttgaagaagtagaaagatatacgataaacatagaagcaaaagaccgaggatctctctcaacacggtgtaaagtaattgtagaagttgtagacgaaaacgacaacagcccagaaataatcatcacgtcactctctgatcagattatggaggattcccctccaggagtggttgttgccctcttcaaaacacgggaccaagactcaggggaaaatggggaagtcaggtgtagcttaagtagaggtgttccatttaagattcattcttcttctaataattactacaagctagtaacagatgaggccctggatcgggagcagaccccagagtacaacgtcaccatcgcagccacagacaggggcaagcctccgttatcctccagcaaaaccataaccctgcacattactgacgtcaatgacaacgcgccggttttcggacagtcagcctacctggtccacgtgccagaaaacaaccagccgggtgcctccatagcgcaagtcagtgcctctgacccagacttcgggctcaacggccgtgtctcctactctctcattgccagcgacctggagtcacgaacgctgtcgtcctacgtgtccgtgagcgcgcagagcggggtggtgttcgcgcagcgcgccttcgaccacgagcagctgcgcaccttcgagctcacgctgcaggcccgcgaccagggctcgcccgcgctcagcgccaatgtgagcctgcgcgtgttggtgggcgaccgtaacgacaacgcaccgcgggtgctgtaccctgcgctgggtcccgacggctccgcgctcttcgacacagtgccgcgggccgcgcagccaggctacctggtgaccaaggtggtggccgtggacgcggactcggggcacaatgcctggctgtcctaccacgtggtgcaggccagtgagcccgggctcttcagcctggggctgcgaacaggcgaggtgcgcatggtgcgtgctttgggtgacaaggactcggtccgccagcgcctgctagtcgctgtaagagatggaggacagccacccctttcagccactgccacgctgcacctggtgttcgcagatagcttgcaagaggtactgccggatttcagcgaccatcccacaccctctgactcccaggctgagatgcagttttacctggtggtggccttggccttgatttctgtgctctttctcctcgcggtgattctagctattgctctacgcctgcgacagtctttcagccctactgcaggagactgctttgagtcagttctctgctccaagtccggacctgtgggtccccccaactacagtgagggaacgttgccctatgcctataatttttgtgtgcctggggatcaaatgaatccagaatttaattttttcacatctgttgatcattgtccagccacacaagataacctcaacaaagatagcatgctactggctagcattttaactcccagcgttgaagcagataagaagattcttaaacaggtaagtatttaaaaatgtatttaatcctttttatattacaatatgccaatatattccaatatagtggtattattttaagattctagataacttcttcatagagttcgcaaaatataggtcaaatttatggttatcattattaaaacaaaagtttaaattaaatgcctcagtcttcctactattcaaagacattttaaagcaaactacatgggtaatctccggtgacatttttatgaagtaaaatacctttcggttaaaaatataaaatacaggtatatttttacggcatggtattttaattgaaaccctgatgctactcaatttttctcaagtatttcatcttcatttactcaataaaggaaccttgtaagaattatagttaggcatcctacctgatgattttatcgggaccgtattatttccacttccagaaatgtcgttcctttcagtcggttaaaatcaattggaaccaactacaacctacaagttttcagctccagtaatattttgaaaactttttaaaaattaagcaagcccttttaataattactcctttcgcaggtgttcttggtaaagttttaacgtcacataatgtaagtattgtgtatcatcgtttttaagctctacaaatacgtgtgattcacaaaggtgagcgtaatcatttcttctggaatttcttagtcgttgcaataataagaatgggctctaggcgccgctgctcaccaatcagggaatgggaagctgcgcgccattgagtccctccctcccccgcctctaccacacaaagcggaatgagatggatactcacagatcctgacactggagacttagaagtattttccttcgctttctgatatattttggatgtagtcggcctaggacttcatagatacataagccgattcacaaccaaccagctcgagaaaccgcggaatatcggcttagagcctgccatggcgaatcggctacagcgcggggaccgcagtcggctgctgctgctgctgtgcattttcctggggacgctgcgggggttccgggccaggcagatccgatattcggtgccagaagagaccgaaaagggctccttcgtgggcaatatctccaaggacctggggctggagccccgggagctggcgaagcgcggagtccgcatcgtctccagagggaagacacagcttttcgctgtgaatccgcgaagcggcagcttgatcacggcaggcaggatagaccgggaggagctctgtgagacggtgtcctcctgttttttaaatatggaacttctcgtggaagacaccttgaagatttacggagtggaggtggaaataatagatattaatgataacgcccccagcttccaggaggacgaagtggagataaaagtcagtgagcacgcaattcctggggcgcgatttgctcttcctaatgctagggatccagatgtgggcgtgaactccctccagagctaccagctcagccctaataattacttttccttgcaactgcggggcagaacggatggggccaagaatccagagctagtactggagggaagcctggaccgagagaaagaggctgctcacctgctcctcctcacagctttagatggaggcgatcccatccgaaagggcgcagttcccattcgtgtggtggtcctcgatgtaaatgatcacatcccaatgtttacacagtccgtatatcgcgtgagtgttccagaaaacatcagctccggaactcgggtgctgatggttaatgcaacggatccagacgagggaatcaacggggaagtaatgtattcatttcggaacatggaaagcaaggcttctgaaatattccaattggattcacaaactggagaagttcaagtacgggggtctctggattttgaaaaatatagattctatgagatggaaattcaaggccaagatggtggaggtctctttaccaccacgacgatgttgatcactgttgtggatgtgaatgataacgctccagaaataactatcacctcttctattaattcaattctggaaaactctcctccaggtacagtgattgctcttctaaatgtgcaagatcaagattctggagaaaatggtcaagtctcctgttttattcctaaccacctgccttttaaattagaaaagacttatggaaattattacaaattgataacaagcagagtgctggacagggagttggtccagagctacaatataacgttgacagccacagaccagggaagcccgcctttgtctgcagaaactcatgtctggctgaatgtggcagatgacaacgataaccctcccgtttttcctcactcctcttactctgcctacattcccgaaaacaaccccaggggtgcctccatcttctcagtgaccgccctcgacccggacagcaaacagaatgccctggtcacttactctctgacggatgacactgtccagggggtgcctctgtcctcctatgtctctattaactccaacactggtgttctctatgccctacaatccttcgactatgagcagtttcgagacttagaactgagagtgatagcacgtgacagcggggacccgcccctcagcagcaacgtgtcgctgagcctgttcgtgctggaccagaacgacaatgcgcccgagatcctgtaccctgccctccccacagacggctccactggcgtggagctggcgccccgctctgcggaacctggctacctggtgaccaaggtggttgcggtggacaaagattcaggccagaacgcctggctgtcctatcgcctgcttaaggccagcgagccgggactcttcgcggtgggggagcacacgggcgaggtgcgtacagcgcgggcactgctggacagagacgcgctcaagcagagcctcgtggtggccgtccaggaccacggccagccccctctctcggccaccgtcacgctcaccgtggctgtggccgacagcatccccgaagtcctggcggacctcggcagcctcgagtctctggctaactctgaaacctcagacctctcgctgtacttggtggtggcggtggccgcagtctcctgcatcttcctggtctttgtcatcgtgctgctggcactcaggctgtggcgctggcataagtcacgcctgctgcaggcttctgaaggcgggttggcaggtatgcccacgtcacattttgtaggcgtggacggggtacaggctttcctgcaaacctattcccacgaggtctctctcattgcggactcgcagaagagtcacctgattttcccccagcccaactatggggacacgctcatcagccaggagagctgtgagaaaagcgagccactcttgatagctgaagactcagctatcattttaggcaaatgtgacccgacaagtaatcaggtgagatttatttctctgcctcctaattgttggtgtcttggcacaagtcttttaaggagatgttttttgagcctgttatgaaaactgtttggggggggggtggggcggcatatatttagttcatatatatttagagcaatacatgtgagttttactttgcctttcatgagattacgataatctttcagaacgtttttgtgaaagtcatttttcaatcttggcatattttcttttgatttcaaaggggccattcaactatgctggtttggtttgaagtaagttgaattttagtattatttttctattatcagtgtatgaggctctcaatttattatatatagatacaaattaatgattcacaaacactttttatttccatttcaattttgctgtgccttcactgatttgtagttatattccaccattatttgctattactgctaatgttcaaattttgatcctgttgatttaatagcatgctccctctagctctccttctcatctatctatctatacacatgcacacacacttatacacgtaagcttttctctgagcaattttattttgattcttggtggctggtaatatgcttagatcctgttgactatttcaactttgtctcatttcttcatcctatcaacacagacatattgactggcttttaactactggatttccttgggagataaaatttagatcacattttttcttaagctctagatgtcttttccattactatggtgaagttacattgactgttctgaggaaataattgaattattgaactggtattatttccttttattcttttactttggtgtctgtgtttgtatgtatggaaggttttttaatgtagtaaatccatatatagaaataacttgattttgattcagtgcttctcaaaaacctattttcaaatgtgctaaagatgtctacagatttattcaaatagagtagtttgtgaatatataaatagattgaaggtatttggactttaattaaactgatttagctagtatccttctggctatttttttgttcattttcagtgtagttgggagtcatagattccttctttctttctttataaggtcattcttatggcaaatagtacattcagttcttttattcagaccaacttgttattgaagcttgatagttgcctgacatacatgttatctgaagcaatgtctaggaaagccaaatgaggaaaggagacttatctagggtttttgatcacaggaatcatttccataatcaattcagtcaacactctcacatcacttctaggtatttgccccaaattacttggatatttatgttccctttcaagtttagttttctcatttaggaatttaccttatgtcattagttgtaaactgactatctagggctcggacaaaaataatttcaactgtaggaaaggcaagtcttccaacagatgcctacatttttcttgaagtcaagaaaaatgttcaggtattttgagcatctagggataggatttatacttgtggaattccaaactgagaaaaatgatgtaaggcattgtactttgactggaattagttaaataaaaaggatatgaggtatttggctgggaaaaggagattgttccatattataaaacctcatctaaactaacttcccaagatcgtggagaacaaaaaggaagggttggctttgaaatgtgatattaagagggttatgttgattcggaggtagtgataaagttctgttaaggtataacatatagtcccattaaatagaggataaaaataaaacaccatcacatttcatgttattaattcctatggcaacctactaggctatacctttatattctctttatgatgaaacatgaaacaataatccttttcagaaacctcttttataagtgataagaagggtttggctaactttattctgaatatgccctatatagctttcagtgctcctccagttttctctgataaaactaggaggaaaattatctgcacatcagattgaaaataatactgcatatcatttcatagtggtcaaaattttcccataccacttgatggggatgttttcccacaaggtttttgttctacaacaggagagaagactttgcctagttcttccaatatgtgcattgcttctgcttagaaaaaaacaaacttttaaattctctttgctgggttaatgactgttctatagattcccatctctaaggaatcttctttggtagtaaacactggaaaacagtcactacgaaaactcataaaatgtctagtttcctatacattagtccaacacatcagtctaattctgaatcccattgaattagcaaaggcttccggctgcagttttctaaatagactcagagccctgctgttggccaatgtgctgcaagaactggagcctgggatctaccaggacgatattctgttcagtcacagaagcaagtcggagagtggccaagacttgggctttctgctcctgcaaatctgattccatacggattggggtgccctcaaactgggagcattgagttttctatgtatggaagtaaatattttaaaagcactttgtgaaacattttctcttaacgtcggagactgcagcaacgcatgggaaggatgggaaacagggtgaagcagagaagcaggacccggcagtggcaagcactcttccctttcctgctgcctttgttctgcggggcaccctcggagcagatccgctactctattccagaagaaacggtccagggctccgtggtggggaaccttgcggaggacatgcggctgcatgttcaggatttattgacctgaaaccttagagttagtgcagagaaacaatactttaccgtgaacacggagaatgggaacatacttgtgagtgacagaatagatcgagagtcactgtcttcaaaatcctctgtgtcatacccttagagattgtagcagagaatcctctaaatgtttttcacataaatgtgatgatagaagatataaatgataacccacctcattttccccaaaatagcattgttttacaaatcaatgaactagcaattccaggcattcggtttggcctggaatctgctatagatgcagatgtagggcctcactctctccagagttaccagctcagttctaatgaacatttctctctgatgatggacaagactaaaggcaagaacgctccagaattagtgctggagaagcccctgggccaggagcaacagagctctcatctcctggtcctggaagcaatggacatgggtgacccagtcccaactggcactgctgcaattcaaattgaggtcactgatgccaacgataatgccccagtttttagccaggatgtatacaaagtcagccttagagagaatgtgcccccaggcacctctgtactaaaggtgacagccactgaccaggatgagggtgtcaatgcggagatcacctactctttcaaatccctacgagatgatattggaaatatgtttgtgctagaccatcaaaatggggaaattaaatccaaagacttaatagacttcgaatttcgtagcagttataccatgagagtagaagctaaggatggtggaggcatgaccagcgaatgtaaaattatactagaaatcctagatgagaatgacaatgccccagacgtggtttttacttcagtgtccagttctgtaactgaggacgcagaaccctggacggtgatcactctgttcaaaacacatgataaagattcgagagaaaatggggaggttacatgcctcataaacgaaagagttccttttagaatcgaatcttccgccaataatgactataagcttgtaacagatgggaccctggattgggagcggatcccggagtacaacgtcaccatcactgccactgacaagggcaagcctccgctctcatccagcacaagcctcaccctacgcattggtgaagtcaacgacaatgctccggttttccaccaagtctcctacgtggtccacgtggccgaaaacaaccttcccggagcctccatcccacaagtcagcgcctctgacctggacctagggctgaatggccaagtctcctactccatcgttaccactgacttggagctgcgggcactgtcgtcctacgtgtccgtgagcgcacagagcggggtggtggtcgcgcagcgtgccttcgaccacgagcagctgtgcgccttcgagctcacgatgcaggcccacgaccagggctcgcccgcgctcagcgccaacatgagccggcgcatgttggtgggcgacctcaatgacaatgtgccgcgggtgctgtaccccgcgctggggcccgatggctccgcactcttcgatatagtgccacgcgccgcagagtccggctacctggtgaccaaggtggtggcggtggacgcagattcgggacacaacgcttggctgtcctaccacgtgctgcaggccatcgagcccgggcttttcagcctggggctgcacacgggaacctgctggttgctgtgcgtgacggaggacagccgccgctctctgcgccgctacgcttcacctagtcttcgcagacagcctgcaggaggcactgccagacttcagtgacagtcctgtgccctctgattcccaagcaaagctgcagatttacctggtcgtggccttggccttgatttctatgctcttcttcctcgcagtgattttggcggtcgccttgcacctgcgatgctcttccagcccctctgcctggggttgctttcaccctggtctctgttctaagactagaccaggggtttttcccaactacaatgagggaactttgctttattcctgcaatctgtatgttccctcggattctagaaaaagaagatttaattttctcaccatgacaccagaaacagtccccccacaagatctttctaatgaagtttctctggtagcaagcttcactgaagagaataacaagataagctctaactctgttgctcctactcacgtgagttccaatgaatgtctttcatttacaaatggatgaggtttaattttcaaaccaatattttggcaagaaaatcttaaacatattatatctactattgcttcaggtttgtttgcccactcttaatatttcctgttcctttctgtgtgggccagtaacttcattattagctttcatgtatttttgaaacattttcaccatttttacgggagactttttttttttttggacggagtctcgctctgtggtccaggctggagtgcagtggcatgatctcggctcactgcaagctctgccttccgggttctggccattctcccgcctcagcctcccgggtagctgggactacaggcgcccgccaccacgcccggctaattttttgcatttttagtacagacggggtttcaccgtgttagccaggatggtctcgatttcctgacctcgtgatctgcccgcctcggcctcccaaagtgctgggattataggcgtgagccactgcacccggcccggagacattgtttatacacacacacacacacacacacacacacacacacacgtgtgaaaagtgggtattatgatactgctgtcattgagatattttaattgaggaataaatttttttcctgtgatgtttcttgggacatcaatatttgagtatataaggctttttctttaatccattaactataaattttgaagaaaatgcatgagaaaatggagaaaatgtgttttttttttaaaaaaaattgagattaaggtctcattatgttgcccaggctggactcaaactcttgggctacagtaatcctcccacctcaatctccagagtagctgagactacagttgcctgaaactgtgcctggcagagaaaaaagcttaaaaaaataagaacatggtaatgatttgataatattcagttacatttacttttgattcttgtaattcaagtaaactcaattttatgtctgatattttctcacagctacctatatatttcttcccaatttaaaatatattattttattttatgcctagcaaatatctttacagtataaatatttacgctcatgaaagtacgtagccagttatttcttagggagaattttttccctatattttgatgggcttccaaaagtattaccagtaattctcagtaattacaattaggtcagttacccaggaaaaggtaagtctgtaacattctttggactaccaattttcttttactaagtttcctgaacaataaatatttttgaaatataatgtattaatagaattctggagtacttccattatttccagtcaatgcaagttggaatgcttctactttatgctaaaaatattaatgtttctttttcacttgggttcttgttaagtgtgattctgataatgtatacaatcacatatcatttttaggtttccataatatcatgaaaatttgatttttaagcgttacatgtcaacaacctggtaaagtaatccttccattcaggatcattcaaggaatctatttaaaaatattttccccaaattatagctgaatcagaaagtttaaattattatattatatgatttgtcaaaaagagaaactcctagggagacatctccataataggtgtgttgggggaacagtaatctcaaagcagatgcactaacattataagattaaaatcattgtttatagaaacttccaattcatttaaaagctcattggggaaaaaaaagctcattgggaaaaaaaaaaaaagctcactaaagtttctattaaagcgaatacggtagatttccatccccttttgaagaacagtaggtggagctatttaagatataaaaacgaaatatcctttctgggagttcaagattgtgcagtaattggttaggactctgagcgccgctgttcaccaatcggggagagaaaagcggagatcctgctcgccttgcacgcgcctgaagcacaaagcagatagctaggaatgaaccatccctgggagtatgtggaaacaacggaggagctctgacttcccaactgtcccattctatgggcgaaggaactgctcctgacttcagtggttaagggcagaattgaaaataattctggaggaagataagaatgattcctgcgcgactgcaccgggactacaaagggcttgtcctgctgggaatcctcctggggactctgtgggagaccggatgcacccagatacgctattcagttccggaagagctggagaaaggctctagggtgggcgacatctccagggacctggggctggagccccgggagctcgcggagcgcggagtccgcatcatccccagaggtaggacgcagcttttcgccctgaatccgcgcagcggcagcttggtcacggcgggcaggatagaccgggaggagctctgtatgggggccatcaagtgtcaattaaatctagacattctgatggaggataaagtgaaaatatatggagtagaagtagaagtaagggacattaacgacaatgcgccttactttcgtgaaagtgaattagaaataaaaattagtgaaaatgcagccactgagatgcggttccctctaccccacgcctgggatccggatatcgggaagaactctctgcagagctacgagctcagcccgaacactcacttctccctcatcgtgcaaaatggagccgacggtagtaagtaccccgaattggtgctgaaacgcgccctggaccgcgaagaaaaggctgctcaccacctggtccttacggcctccgacgggggcgacccggtgcgcacaggcaccgcgcgcatccgcgtgatggttctggatgcgaacgacaacgcaccagcgtttgctcagcccgagtaccgcgcgagcgttccggagaatctggccttgggcacgcagctgcttgtagtcaacgctaccgaccctgacgaaggagtcaatgcggaagtgaggtattccttccggtatgtggacgacaaggcggcccaagttttcaaactagattgtaattcagggacaatatcaacaataggggagttggaccacgaggagtcaggattctaccagatggaagtgcaagcaatggataatgcaggatattctgcgcgagccaaagtcctgatcactgttctggacgtgaacgacaatgccccagaagtggtcctcacctctctcgccagctcggttcccgaaaactctcccagagggacattaattgcccttttaaatgtaaatgaccaagattctgaggaaaacggacaggtgatctgtttcatccaaggaaatctgccctttaaattagaaaaatcttacggaaattactatagtttagtcacagacatagtcttggatagggaacaggttcctagctacaacatcacagtgaccgccactgaccggggaaccccgcccctatccacggaaactcatatctcgctgaacgtggcagacaccaacgacaacccgccggtcttccctcaggcctcctattccgcttatatcccagagaacaatcccagaggagtttccctcgtctctgtgaccgcccacgaccccgactgtgaagagaacgcccagatcacttattccctggctgagaacaccatccaaggggcaagcctatcgtcctacgtgtccatcaactccgacactggggtactgtatgcgctgagctccttcgactacgagcagttccgagacttgcaagtgaaagtgatggcgcgggacaacgggcacccgcccctcagcagcaacgtgtcgttgagcctgttcgtgctggaccagaacgacaatgcgcccgagatcctgtaccccgccctccccacggacggttccactggcgtggagctggctccccgctccgcagagcccggctacctggtgaccaaggtggtggcggtggacagagactccggccagaacgcctggctgtcctaccgtctgctcaaggccagcgagccgggactcttctcggtgggtctgcacacgggcgaggtgcgcacggcgcgagccctgctggacagagacgcgctcaagcagagcctcgtagtggccgtccaggaccacggccagccccctctctccgccactgtcacgctcaccgtggccgtggccgacagcatcccccaagtcctggcggacctcggcagcctcgagtctccagctaactctgaaacctcagacctcactctgtacctggtggtagcggtggccgcggtctcctgcgtcttcctggccttcgtcatcttgctgctggcgctcaggctgcggcgctggcacaagtcacgcctgctgcaggcttcaggaggcggcttgacaggagcgccggcgtcgcactttgtgggcgtggacggggtgcaggctttcctgcagacctattcccacgaggtttccctcaccacggactcgcggaagagtcacctgatcttcccccagcccaactatgcagacatgctcgtcagccaggagagctttgaaaaaagcgagccccttttgctgtcaggtgattcggtattttctaaagacagtcatgggttaattgaggtgagtttatatcaaatcttctttcttttttttttttaattgctctgtctcccaagctggaatgcagcggtacgatcatagctcactgcagcctcaaactcctaggctcaagcaattatcccacctttgcctccggtgtaacagggactacaggtgcaagccacctactgtctgcctatctatctatctatctatctatctatctatctatctatctatctattactttcttgtacagacaggagtctcactatgttgagcaggctgatctgaaacttgggctcaggctagcctcctgcttctccctcccaaactgctgggattacaggcgtgaaccacagtgccccgcccttatcagatattcttttctggctgggcgcggtggctcacgcctgtaatcccagtactttgggaggccgaggcgggtggatcacctgaggttgggagtttgagaccagcctgaccaacatggagaaaccccgtctatactaaaaaaatacaaaattagccgggcgtggtggtgcatgtctgtaatcccagctacttgggaggctgagtcaggagaattgctttaacctgggaggtggaggttgcaatgagctgagattgtgccattgcactccagcctgggcaacaagagtgaaactctatctcaaaaaaaaaaaaaaaaaactttatcctctagtttcatccattgatgacacttgctttaatcacttattacaatcacctccaaatgaagattttataattccattgtttcttctacagttgttaattggctttctaccttgaagaagagttttatattctctatatatgtttgtttctatgattctggaagcatggttttctattttattcaatggcctgtaatctgttaatatcaattatttattttgatgctgaaattgtcccaggattggcctttgggactccctttaggctgatttctatgtcctttctgttacagcaagcttgggattatatccaagatttgtaattccaatgtacttacttctgtcagtgtaaacaaagtacgatttctggactagatgacttgggcattgtgggggaggtggaaattagaggtattctctgtttttcctgtaggatcttgcatttcttcctcttgctgcttgtctctttgtgtcgggaacaggccccccaaaatctggccataaactggccccaaaactggccataaacaaaatctctgcagcactgtgacatgttcatgatggccgtaatgcccatgctggaaggtagtgggtttaccggaatgagggcaaggaacacctggcccgcccagggcagaaaactgcttaaaggtgttcttaaaccacaaacaatagcatgagtgatctgtgccttaaggacatgcccctgctgcagataactacctcaatccatccctttatttccgcccatctcttcgtttcccataagggatacttttagttaatctaatatctatagaaatgatgctaatgactggcttgctgttaataaatatgtgggtaaatctctgttcagggctctcagctctgaaggctatgagacccctgattccccacttcacacttctaaaaaaaaaaaaatttttttttctgagcttggagaaatatatcccttagtacacttggcatttataaagcagacatcaataaatttatatatatgtgacagataccaacaacaatccagtccccttccctcataccttatttatgtacatatattttatataatagatataatttattaacaatttataaaattactttgttaatactctatatcattttctagctgaatttatcaatgataatgctcttttcccacttttatttttttcccattgaccatgcagcagttttgtgtagaccgtctgataacaactgatctgtttatctaggggggagaaatctaattcaatggaaaatataaataaaattgtgataaacttttgtaaatagagtggcttttaactacacttgagatggctagcaaattcataaagtgaatttactttctttcaaagttcagtaattctttctggccattagggatatgtccatttatactttctcagtatcccaagtcatttcatggttttaaatcattcatgaacttccaaatatagtgaatttatttcttctgcatttaaaattttatcacttaaatatacaatataccgtattgccatgacgaaaaatggtaaagactatttttcacttctgttatgcatttcattaatacgatatctgtatgtgtttccaagttagacatttcttttgcccatttcctacactaatgatactaatgatgactttgtggaatattcagaattaacaaaatgtgttttgagtgctttttttagtactggggcaaatttgcagtaatatcgcctgctttttacattaaattccccataacttttacaactatgggaaaatttctgaaacgtgcacagattccaagtgttttctgagaactttatgcttattgtagagtggttacagacactgaatgctaaagtgtattactctttgaaaagcattgcttgatttcttttggtgaattctgtaaaggtgcagggaaacataacgtcccaattattttttctttcttctttgtttgctgcctatctactttgaaagatacaatagttaaaacccagaaaagagattggaaaccccttagagaatgaaagacatccaagggctctaaaatgcggcagttgctgcttctgagaccaaaaaagggggcaaaatatagagtgtgtggttctacttgtgtgattttttgaaagaaagtatttgaatttatctaaaaatactaaatttgtatttacattagttttcaaatagaatttaataagtacagtgttctataggtaatattgagagaaatagaggacaatgaaacctctctcctccatcatcttgtatgaactaccaaaatgtttatcatatggacagttctcatatatagtcaaatagaaagaaagacataataggaaaacaaatgacttgggaaactaagctaacatggtctaattattctgacctctgctcacctaacttgatttaggaacaaatcattgagagttagagcatgaatagtcaagactgttagaccatatctcaaatatcagtgacttcaatcaactatgtttccagtttaagctgaataggctttattaaatagttgttgaatgaatggataaacaaataatgtactctggggattacctgataccaggattctgaattttcagatgtatcatagaaggatagcagctttgcaattaggtaaattgttaactgtgtcacctttagcaagttatttaatctctttgagcttcagcaaagtaggaataatcatatctaatttgaaaggtcgtggtgatggctagggctaacaaaaatctgattcacaacatgcaattaattaacagtagccatttttagtggttgaccaaaaaaaggatttatattttcaatgccagcacactcgatgttctgttgggaaaaataataatgatttttgtgtgcttctccatatggtataatggaatgatttgtggatggaaataaaactgttctaaaatttttgtgacagctggtttaaaaatcttaagtgcctaggcacattcttgattgagaagccacagttttaggccataaaagatgggggaaagatttttatatgagacaattttgtgagtgttactttttctttgtctgaaccatagtgaaatctaaacaaggatcttgtgaaacttattttaaagaagcagtttacttcaatgggatcttagataatttcaccagaaaatggatcaccgaaaccagaaggctggtgatcattatttggtttgggccatataagaattgaaactaacggcttagctttaggatttttaggacacttgttgataatttaggattcataattaacatatgtgttgattgttttctgagactaactgggcaatgggtttggatgtgtttacatttattctgattccagtcataaaattatgtcaaggactttccttgtctttttatgtgtatgacagatgtgtatgtatccatttcatctaacaagttaaagcgttcagctataatttaaaatttgtagcttcactgttttatagtacctaaaattggaatgtaatcagtcagaagacattcatccactgctttcattccagaagtattatgctttttgaagcagcaatagcataggaatgttgaggagactatactatacttttatagcatatttaatctcgtagatcacttttcaatgaattataaggctgatgacaaatgagcaaattgtatcagttttctttatgacatgtaacagagtatagctgtgatcatgaattggatagttctggtgtaaaaatctgctttatccccatataagatgtcaggttcagaaaagcaaacacatagtttcgaagagatgttgatcaaactgatgaggctaaatctcaagaaagagacacagttaccctctaatgttacactttgagttcacctttttttttttttttgagacagagtctcaatctgtcgccaagctggagtgcagtggcactatcttggctcactgcaacctctgcctcctgggttcatgctattctcctgccttagcctcccgagtagctgggactacaggcacacgccaccacacccagctaatttttgtatttttagtagagatggggtttcaccatattggccagaatggtcttgatctcttgatcttgggatgcacccaccccacctcagcctcccaaatagctgagattacaggtgtgagccaccatgcccgaccactttgagttcacttttaagaaaccatacttaatggaaaattaccagtaacagggcatactgtttaggatgcattcctaaaatattaatggcaaaagatagccagcctatggcaaagctaattggaaaaaatattttataaaggatgagacttctggataccatatgggaagggctctggttcaggaaaatgtttttaaaaaactgtcattgaagagaccatagaatcaaacaaaataatttaatctgtatgtaaaagaagttggtaccaccataatttttcttatacatgtcatataaggatctactctgtgtattgtcattgagggcagatataatttcttagttcatcattaactctctgaagtatttcacacagtagtttgtacaccttctaagtactcaatacaatgcttgagttcaattattggaaagtggtctcttggagaaaaaagaatcatagtgcaaaaccaattattttacatggacttttcctctatatctaagccctaataagaggcagctgtctgatatacatacatacatacatacatatatatatatatatatatatatatatatatatatatatatatacacacacacacacacatatatgtatatatatatttggagtaggggatggagtcttgctctgtcacccaggctggagtgcaagtggtgtgatctcagctcactgcaacctctgcctcctgggttcaagcgattctcctgcctcagcctctccagtagctgggattacaggcgcctgtcaccatgcccagctaattttttaaaatatttttagtagagacagagtttcatcaagttggccaggctgctcttgaactcctgacctcaggtgatccacctgccttggcctcccaaagtgctgggattataggcatgagccaccgcaccctgccaactgtctgacttatcttaaaaggctaaggacctggtttgtttgtcaaattttgaaaatagatgcctcagttcataagatttccatattgtgtggcaggcgcctgtaatcccagctactcaggaggctgaggcaagagaatcacttgaacccgggagacagaggttgcagtgagctgagatcacgccactgcactccagcctgggcgacatagtgagactctgacaaaaaaaaaaaaaaatccatatgtgaaaattcttagaagcttcctatacaatttcagctgaagattcagccaacagttcattctgagactgtgttccatggaaaaagtaaagcccaggcatggaagtgggaatggaaagaaagattctaagcctacaaatactcaaacatcaagaagaaataaaaataagtcatcacttcgacttcatgtgctaacatcactgaggttataaattcccaggaatattttattgcgggagcaagactgcactgctgcctttcagcttgcaaattccagtgagaaacgtctttctctctgctctcaactaactctacagaacgctgtcctctcatttcttcaggctgcagttctagagtagggactcagagtgccactgttggccagtctggaaacagagataaatgagccaatccccagacattccggcttggtggcttttctaatttcatggaatgcaaatccaagagcagacccacaacattcctattatggctcctagttctacaaattataagcaggaacggaacggatttacaggcaatgagttcagctccttcttggctggagattctataatccaagaagagtttgaaaaggggcttatttgggctggagcagcagcaactctaactgtggaaaaggtggggaatggtgctggactgacagtctgggtagaaccaaggcgactactgcctcctttcctgctatttctatcctgctgggcattctctatgatgcagatccgttattcagtcctagaggagctggccaagagtttggtggtgggaaaccttgccaaggatctgggactcagtgtcgaggacatgcccacttgaaagcttcgggttaatgctgaggaataatacttcattctaagtggggaaagtggagacttacttgtgaatgactgaatggatcaggagcagatacgccccccaattatagcttgggccataacgctttgaaatagttgaaggccaggcatggtggctcacacctgtaatcccagcactttgggaggccgaggcgagcagattacgaggtcaggagttcgagaccagcctgaccaacatagtgaaaccctgtctctactaaaaatacaaaaattactgggcatggtggtgcaggcctataatcctagctactcggggggccgaggcaggagaatcgcttgaacccgagaggcaatcgcaccactgcactccagcctgggtgacagagcaaggcgccatctcaaaaaaaatgaacaaacggtagttgaaaattctttaaatgtttttcacattaatatggagattcaggatatgaagaatcatgcaccacggttcagcaggaatgttattaagttacgtatctctgagtttacccagctggaacaagatttgcaacagaacctgcagaagatcctgatgttgagagaaattccttacaaaattatcaccttagcagcaactctatatttctctttgaagtaaaagtgaccaacagtggaaagacatatgttgatcctgtgttagagaagctgcttgactaggaaaagcagagctcccatcccttagtgctagcagccttagacggccccccaacaaagcagcatcactcaactcctgatcctattggttgaagccaatgacaaccctgtgttcatctaggatgtgtacagcgtcggccttcaggaagatgtgcatccgggcactcctgtgctgagagtgagggccaccaaccaggactagagtgtcaaggcagagatcacatatggcttcacaacccagagtacccatatctagtttggccttgatcaaatagtggagaaatgaaaactttaagtacattggacttttaaagatttttaatttccatggttttggtagcaagtgacagagagggactcattgtccagtgtacagttgagaccgaatttctagaagataatgacaatatcctagaggcgatttttacttctaattccacaatgattcccaaagattctgcaccttggacagtaatcactgtccaggatttaaatcacaagatctttaaatcacaagatctggattcgggagaaaacgaggtcacatgtctgatataagaaaatgcaccttgagaaaaatcttcctccaataattaactacatgcttgtaacaaatggggccgtggaccaggaacagacccaaggtataacatcagcatcactgccactgacagaggcaaaccaaccctctcgtccagcccaagcatcaccctactcattggcgatgccaacgacaatgctctggttttctaccaggcctcctacgtcgtccacgtggccaagaacaatcttcccaaagcctccatagtgtgcaagtagacacctccaacctagacttgggacccaacagccaagttccctattccatcgtggccagtgacctggagccacaggcgctgtgattctaggtgtccttgagcgcacagtgcgccttcgaccaagagcagccgcgagccttcaagctcacgctgcaggcccgcgaccaggactagctcgcgctcggcgtcaacgtgagcctgcgcgtgttggtggacgacctgaatgacaacgcaccgcgggtgctgtaccccagctctggagcgcaatggcttcgcgctcttggatatggtgctgcacgccgcggagcctggctacctggtcaccaaggtggtggctgtagacgcagatgtgagacacaatgcgtggctgtcctaccacgtgctgcaggccagcaagcccaggctcttcagcctggaatgcgcaccgacgaggtgctgacagctcgcacgatgggccacaggaaagcgactcgccagcgcctactggtcgcggtgcactgcggtggacagccgctcctctcgctaccgccacgtcaccaccactaccgcccctcgtcgccgacagcctgcaggagactctgccagacctcagcgatcactctgcaaagctacagcctgaatccaaaattaatttatatctggtgattgccttagctttaatttcctttttattcttcctgattgcattgtttgtgctggttttaaagtgccgaagaccccaaaatgatcctgtctgagtctttcccacggatgtctatcccgcgctaagccccaggtttctgggtaactgtagctctatgatgccatattcctaccaggtgtgtgcttctcctacgaatccagggctgagtgaacttcttttttgaatccctacccctcaggactcaatagcagtttcactgcagaaagccccttggggaaggggatgattgtgattattctaattgcttgggcagaatccactctccaaggtgaaaaattcttgatgaaactaagttcagtcacaagcaggttttcttctagcattaaatattttcagagatctcagtaaaaagcatttctagcagcaagaccaaaggcctaagatgagaaatatttggcatggtgagcttgagggacagtagtcaggcagacaagagtatcagacatgccagagcatttggggcctgtaggtaaggagcatgttttgattatatatatttgtatgtgtttgattatattttataattttactttgatattcaaattgtactgatccaaaaataagggagggacaaatcttggccattgtagtatgagagatgtaaatttacaactcagaatccctgcttatcacttctccttcagcacacaactgtttcattttctatttaagaaacttcctctcactgcaaaaagacattctggctgataaagttagcctataatttcagtaaatctaagaatatgactaatggaagttgccagacctaaactttgaaaattattgttccactgaagagcgtcttatgactgagtgttccagtctccttctcaagctgaaccttgcttttcaaaccagattaagaacactatcataagttatactgcattttatttccctacccatgtccactgcatcattctctatagtacaaagagcttgtctcgccaggcgcatctataatcttagcactttggggcgccaaggcgggtggatcacttgagcccaggagtttgagaccagcctggacagcatggcaaaaacccatctctacaaaaaaaaaaaacaaaaattaacaaggtttagtggtccatgcctgtggtctcagctacttgggaggctgaggtgtgaggatcacctgagtctggggagattgaagctgcagtgagctgtggttgcgctcctgtactccagtctgggtgacagaattagaccctgtcccaaaacaaacaaacaaataaagagcttctctccttatgacttatttaaagcttgggaaattgttccaattcaaatgctttaaatggacttgagctaaaacagaatgtggtatatgaaatgttcttataatcaggtgattgtaaaaattgatccagataatgttagcatagcattttactgaactagtagtttacaaacacttcaaaaattatagaataacatttgcatataaaattcctcatacatttccctatcagtgaattggaagcttacaatatacaatattaccaaaaagacaaaaaaaatgaaaaggaaacagttacctttggaaaacataattaggtaaaatgggtaatatggaaagtctgaaaactgaaaaaattactgataagtcaagagaaaaggaatattagtaggaaaattcataaaagtgtgtctgactactcacagcaggtttccttattggtatgtattctgtggtccatctaagctatgttaattttattttaaatgctacctgggtattggcttctaaaaggaattcagtaaatcagataatttggcatcttcaatctagattctgatgctcacctgaaaagtctgctaaggattggaaaccaagaaaagtgaagtatctcaacagatatgtgtcacttgtgtgtactggattttttttttttttttttttttttttttttttttttgagatggagtttcactcttgttgcccaggctggagtgcaatggcatgctctcggctcactgcaacctccgcctcccaggttcaagtgattctcctgcctcagcctccctagtagctaggattacaggcatgtgccaccacgcccagctaattttgtatttttagtagagacggggtttctccatgttggtcaggctagtcttgaactcccaacctcaggtgatcttccctccttggcctcccaaagtgctgggattacaggcatgagtcactgcgcccggtcgcgtactggatttatattgtgtaatactttgctctagcagtatagtaggtgagacagtgactgtgtctagtgagcaaaaggcacttatttgacacttttgactcttcctttctacttaccttatttaaaattgatttttgcatgtggcatgatgcaccagttcattgaggtaggggttgaagttatttcccatttttttcaataccatttattaaaaatattttcctctttctgttgaatttgcttggtgcctttgttgaaagtcatttcactgatatatgtagttctatttctatattcttgatcatgtttcatttgtctattcttttactaatagcacactgtctcaattattgtagctttatagtaagtcttgctacaaagtcttactacaggacaaagcttgtaggatttttgaatgggatggcattgcatctatacctttatcagggaaagagggaaggagggaggaggatcatcttaacaatattgacacttcaaatccatgaacatggtatatatttccatttaattaggtctttaatttctctcagctatgttgtatagttttcagtgtagagaggtcatgtatatttctcattaaattgtccctacatatttgatgttttctaatgttattgtaaatagtatttttaaaattgtatcttctaattgttcatttctagtttacagaaaaatgaaaaactatgtttttatgtattctatatgcttttgaaaagtaagaggtgcaaagtgctctattcttacactatattgtgtgagaatataagtcgaaaccactctgcataagttcaggcttccattctcttcagtttgtaggttgagagaacccatccagaaacagtaaacattggtgtctgcccaagtctggtcctgggtggttcattcattcatttacataacaaatatttattaactgtctgctatatgcaaggcactgacctatggactaaggatgcagcaatgaacaaggcatatatgattcctgagttaatgggccctattctaatacatgatattttacaggtctgataaaagccaacaaggagaaatacaaaagcactaagagaaagcttatagtagggaagcttcgcctaatctgaaggtcaaggaaggctttctttttttcggaaagtgatatttagagagatgaatagattaataggatgagtagaagttatctaggtaacaaggaaagtaaaaaagaaattgtcaggcagaggaaatagcatgtgtaaagatctttttaaaaaataaaaggtgtgactcaagcaatttaaaagggctagggaggctagaaacagaaaataaatagatgaaactaataaggcagggagagccttgtaaatcacacttaaaattctggattttgttctaaatacccttgtacttaggagctattaaaatattttaaacaaggcagtgacaagatatttgaattattaagcttactctggctgctatatggagaattgatttatgagggttataaatagaaataggaagataagataggagactatggcaatattcctggtaagaaatggaagaagagctggcttggattaaaggggaggcagtggatgtagaaataaatggatgaattatagatatatttaggaaatgggttcaataagacttaataatggaataggtggaatataaatttcatgagggcagggggtgttttgtttattattatattcctaggtgtctgaaaatattgttgtgttgcctggcaagtggtagatcttcagtgaaatattattaactgaataaatacaatggataaatggggagcagggattaagagtgattcctgggtttccacattaaggaactggatggacaaagctaccatttgatgagaatggaagactaaagaatgatagatttaagagaaatcgagttgagttccagccatgttcatttgaaggatctgagaaacagtgcagatattcagtgtgtgattagacatatggtcatcattcttttttttttttgagatggagtctcgctctgtcacccaggctggagtgcagtggccctatctctgctcactgcaatctctgcctcccaggttcaagtgattcttctgcctcagcctcctgagtagctgggactacaggcgtgcaccaccacgcctggctaatttttgtatttttagtacaagacagcatttcaccatattggccaggctggtctcgaactctgatctgcccgcctcggcctcccaaagtgtggggattacaggcgtgagccaccgcgcccagccggttaccattcttttactctgagttcttccattgtgatcatctagtcagatgggtagatccttataaggctgagcataataagcttcctgatagctctacactggtatgttttggggttcatggctgagctacttttgtgttttatttatcttcctgatctctttttcactgtaagaaacatccagcacccagggaaatttgctgtctaattcatactccactcttcagactagtcctagtgttcagttttgttttgttttttttctgtgtctggaattctattaaaatgtgtcaggctgttttaatttttgttgtttaattttctttcacatgattatatgtgctccatggatttttttgtttgtttgttttttgtttttgtttttgtttaagcggggtcttgctcttgtcgcgcaggctggagtgcaatggcttgatctcggctcactgcaacctccgcctcccgggttcaagtgattcttctgtctcagcctcccaagtagctgggactacaggcacatgccaccacacccggctaatttttgtatttttagtagagacgggtttcatcatattggtcaggctggtctcaaactcctgaccctggtgatctgcccacctcggcctcccaaagtgctgggattacaggcgtgagccaccgcacccggaggaaatttttaacctcagtttttcttcaccatctgtaaaactgcatagaaggaatgtttaggataaaagatgcataacaatcataacaaaattgttgggttttaatgttatgagtacacttggaggattctatgtccacacataccttaaacatcctatagagtccttagcattttaaagttgaaaccaacagtatgaatgatggtagaattttcccccccaggaagttagaactgttccatatcttgatagagggatgggttataaggatgtacacattttccaaaactcattgaacttaagagtcttgcatgtgactgtatataaattatactttaattgaaaataaatttaagaaaataaaattggctgggcgtggtggctcacgcctgtaatcccagtgctttgggaggccgaggtgggtgaatcatctgaggtcaggagttcgagaccagcctggccaacatggtgaaactctgtctccactaaaaatacaaaaattagctgggcatggtggcggacacctataatcccagctactcgggaggctgaggcatgagaatcgcttgaacccaggaggtggaggttgcagtgagccaagatcatgccattgctctccagcctgggcaacatgaacgaaatgccatcttaaaaaaaaaaaattaaaagaaaagaaaattagcctcccccaccctcactatacctcagactcacccctgaaagatcactactattcatccctggttatgtacacttacaaacattttctgtgtgtatgcgaatgtatgtgtggggttttctttgcacaacaggatcattttacagtatatatactgttgtgcaacttgctctttccacttaatatctcaaggaatcttttctttgaatctttatagccatgtacctcaatcttagtagttttctttattttatttttgaataggaaatacatttacatggttttaaaaatcaaaacaatatactatgtatatattgagaagtctgacttccatccctatcctactcctattccacccttgcttcctcctgtcccctgtaggtaaacattttataactttattaagcatcctgtcagcatttcttatgcaaatatgtacatatatttttatttccccattttttttacaaaaagataaaatactatacaccactttatatcttcctttcttcacattatatcctttaaaaatatttccatattggccgggcgcggtggctcacgcctgtaatcgcagcactttgggaggccgaggcgggaggatcacgaggtcaggagatcgagaccatcctggctaacacggtgaaaccccgtctgtactaaaaatacaaaaaaaaaaattagccaggcgtgatggcgggcgcctgtagtcccagctactctggaggctgaggcaggagaatggcgtgaacctgggaggcggagcttgcagtgagccgagatcgtgccactgcactccagcctgggcgacagagcaagactgcaactcaaaaaaacaaacaaacaaacaaaaaagaacttccatattaatatatagaaagctgttttttttaacagttgcttagcattcctttggattattaaccagtctcataaatgagcgctattgaatagccctgtacctacatcagtttttacatatgcagtatatctttgggatgaattcccagaaatggaattgaaattgctgggtcaaagaggaaataggtgtaattttcttaggtattttcacaagaagtgttaattctaactttctgttttgaaatgatttcaaattttcaaaggagttgcaagaattgtacaaagaactgtatctccttcacccggatgcaccgggtgaattatatgtattatataattgtatctgtaggccaggtgcagtggctcactcctgtaatcccagcactttgggaggctgaggcaggtggattacttgaggccaggagttcaagaccagcctggccaacatgataaaactccatctctactaaaaatacaaaaattagccaggcctggtaccccatgcctaagggtgaggcatgagaaatgcttgaacctgggaggcggaggttgcagtgagccgagatcgcaccactgcactccagcctgggcgacagagcaagactctgtctcaaaaaaaaaaaaaaaaaaagtaaaaaagttttttaaaaagatgtatctatatatacatatttacatacacacccaagtgtgtatgtatatatgtttgtgtgtatgtacacaaacacattatttttatatgatatgatttttttatgacatgattatttttatgacatttgagagtaagttgtagaaattatgtttctttattcctaaatacctcattgtgtatttcctaacaaggacattcttttatataattaaattttaataataaaaatcagaaaatttaacatcaatgcaatataattatttagcctatagtccatatttaaattctaccataccttatagtatattttactatacctcatagtaattttttttagtccaaaatatcacacattgcatttagttgccatgtctcttttttttttttttttttgagacagggtctcactctttcgcccaggctggaatgcagtggtatgatcttggctcactgcaacctccgcctcccaggttcaaatgattctcctgccttagcctcctgagtagctgggactacaggcatgtgccaccacactcccaccacacccagctaatttttgtatttttagtagagacaaggtttcactatgttggccaggctagtcttgaactcctgacctcaagtgatctgcccacctcagctaagtgctgggattacaggcgtgagccaccatgtgtggcctagttgccatgtctctttaatctactttaatctgaaacagttcctcagccttgtttgtttatatgaaactgacatttgtaaagactagaagccatttgtcttgtataatgcctttaatttatatttgttttatgtttcctcgtgattttatatatagagtttgtttgtttgtttgtctgtttgtttgttttgagatggagtctcattcttgtcacccaggctggaatgcagtggcgcagtctcggctcactgcaacttctgcctcccaggttcaagcaattctcctgcctcagcctcctgagtagctgggattacagatgcctgccaccatgcctggctaatttttgtacttttagtagaaacggggttttgccatgttgcccaggatggtctccaactcctgacctcaggtgatccgcccgccttggcctcccaaagtgccgggattacaggcatgagccaccgtgcccggacctcatgattgtatttatttatttatttaatattattattattatttttttttttttgagatggggtcttgctctgtcacccaggctggtgtgcagtggtgcgatatcggctcactgcaaccgctgcctcccagattcaagcaattctcctacctcagcctcccaagtagctgggattacaggcatgtgccaccacacccggctaatttttttgtattttttttagtagagacgaggtttcaccatattggccaggctggtctcgaactcctgaccttgtgatccacccaccttgacctcccaaagtgttgggattacaggcgtgagccaccacacccagccttatgattgtatttagactagacatttttttggtagtatattatttagccattgctgtgtaacaaattatcccaaaacttagtggcttaaaagaagcatttattatctcataaattttgtggatcaggactgggtatagctttgctgagtgcctctgcctcaaagtcttacaaggcagcaattaaagtgtcacctaaggctattgtcttatctgaagggtcaacagaggatggatccgcttctaatctctctcacatagttaatggcaaaattaagttccttgtggattgttagactaagggttccagttccttgctggttgttagcttgaggtctacctcagttccttgccatgtggacctccatagggcaaccagcttctgttagagcaagtaaaggagagtgccagagagggcaaatgtgatgaaagccacaatctttttataaacctaattttgaaagtgacatacaaggctaggcatggtggctcaaacctgtaattccagcactctgagaggccaaggagggtggactgcttgagcccaggagttcaagaccagcctgggtaacatgacaaaaccctgcctctactaaaaatacaaaaattagctggtctggtggtgcatgcctatagtcccagctactcaggaggctgaggccagagaattgcttgaacccaggaggcggaggttacagtgagccgagatcacaccactccactccagcctaggccacagaatgaaaccctgtcaagaaagaaaggaaggaacaagggagggagggaggaaggaagggaggtagggaggcagggaaagaccgagaaagtgacataccatcatttttgctgtagtttgttcattagaagcaaaatcacttggtccagcccacactctggggagatgattttctaactccatttgtaataacttattctacttttattagttggcattatacagtaagaaagagctttcttttctcttcttatttattcatatatggctcatgtgttttttccaatgagttatattctattactaacattttttattttgacctcaaattgttttagatgttaccaataagaacctcttcaagctggttcttgtgtccttttgccataactctctcattttcttgaaccctttcttactttctgatataagaaaatattagagactcatactttccttgttccagttctgagatgaaccatttatccaaaagccttgcttcattttagtagggaatagtatttagaaactaagatctgggtgtgaggtatgctcactgctaatgggctgtcactgtttctaggccttgtcagcagacggagctaggaaaaacacacataaacacacccatatttatatttgtacacacactccctcaaaatcgtgagttcatattgatacctccagttctggttcttcctagccttccccctttccatctttgtatttttattttccaacagtaagaaccctggctcccagtgctatgaatatatttactcatttgctccatccactgcactccagcctaggccacagaatgaaaccctgtcaagaaagaaaggaaggaatgagggagggagggagagaggaagagagagaaggaagaaggaagggagggagggaaaactgagaaagtaacataccatcatttttgctgtagtttgttcataagaagcaaaatcacttggtccagcccacactctggggagatgattttctaactccatttgtaataatttattccacttttattagttggcattatacagtaagaaagagctgctgaagatttgcttgcaattggttgtctttaaactgagggtatattgtcaaagtactgtgctgaaaagttacctgtagtatagttatgtgattcattaaaataaagtttgtttctattatgtgcagttttagagttttgccacactctggttgattagtatattttctgttgcttttttgttttgttttgttttgttttgtttttgagatagggtctcgctatgtcacccaggctggagtccagtggtacaatcacagctcactgcagcctcaacctcgtgcacttaagcgatcctcccacctcagcctcccaaatagctggggctgcaagtgcacaccaccatgactggctaattttttaattatttatttatttatttatttattttagagatggggtctcactatgtttccccaggctgaccctgaactcctggggtcaagtgatcctcctgccttagcctccaagtgctggtattacaggcataagccaccacacctagcctagtattcttttttgaatatgtaaaacattaacataaagtcaaaactattaaaaaaaggtgtactcagaaaattgtcattcctcccctataccttctgcctcattcacaccacactctgtagataatcgatttcattagtttgtggtttatcctcactgtgtttctttttgcaaaacgcaaaaacaaaacctatacatatttatattttcttatgtcctcttctttcttacacaaaaggtaacacactatgtaggtagtcctggctttgaacagtttcactataaaaatatttgttactacagcttaaataacataagtctcctaaaaataattcaaattttagttaccatggtatattaactttgagtagttccataaaggacaaacttggctgctagcccttcagtccacagagcactttgaaaataacagatgagcaaaataatgtggccaatcacatgacttctttcaaagtatgtcagtgatcagtcactgtgtgcctataatttagttcatgcacagacagcaaagcatgtagttgtgttgccttccagtgataaacccacataacattttagaaaaatgtattaagaattggccagcaaagataaaagtgcagcaaagaaacaaaagtgataatgttttcagtgaaatttgaattgaacataaatggagttatagaagaaatagctgaccatgggaatgttcacactgctactttcaagaatctctagaagggcagctaaaggagcttagtgaaggtgaatttattgacatgaatgagaaaagtaattgtgatgaaaaggatgaagatgtcccagagaaagtaatgccagcaaaaacttcacattaaaggaactctcagatatttcaaagcattgaaacctccaagaataaataaaatgttggaagttgatccaaacttagaaaggagtatggcaacttgtcaagatgaagaaaaggtgcttattcctttttatttatttatttagagacagagtttcactcttgttgcccaggctggagtgcaatggcatgatctcagctcaccgcaacctccacctcctggattcaggcagttctcctgcctcagcctcccaagtagctgagattacaggcatgtgccaccacgcccggctaattttgtatttttagtagagacagggtttctccatgttggtcaggctggtctcgaacccccaacctcaggtgatctgcccacctcggcctcccaaaacactgggattacaggcatgagccaccatgctccacctgcttattccatattatatgttataggatgaaaagaggccaaactaatcttgacatgttttttacaaggaaataatcctccatggttctaatttttttttttttttttttttttttttttgagacagagtcgcgctctgtcacccaggctggagtgcagtggcacgatcttggctcactgctagcaccgcctcccgggttcacgccattctcctgcctcagcctcccgagtagctgggactacaggcgccggccaccacgcctggctaattttttaaaaaatatttttagtagagacggggtttcaccgtgttagccaggatggtctcgatctcctgacctcgtgatccgcccgcctcggcctcccaaagtgctgggattacaggcttgagccactgcgcccggtgggtctaatgttttaaattacactgtgttaaataaatattagtttgttggttttttttttagtttttttatttctctacaaatttacaaccaataagagtttttaatgctttgacaaaaaatgttaaaggtcatagtacaatcgcatttcttcccattgattattaacatcactttacatagtttcatcttgcattagcaattttgtgtgtgtgtttgtggttttaaggagcggagagtttaataggcaagaaggaagggagaagacagaaggaaggagctcccccttacagagacagagggagcggggctccaaaagaggaggtccccatctaccgcggataccagccaggtatatatgcagaggctggtggaggtgatgtctgatttgcatagggctcaggggattggtttgaccaggcatatcattcacgtagcccgagaaaaagctggccctcccaccccagccttttaatatgcaaacgtagggcgccatggatgttctaaacacgtggagatatgtggggggcagccatgtggccaggaacttgtggggcaagggcaagaaggctgtgggaatcgccaagttgaatggacctagtttctaatggcctgcatttgcatatcaaaggttgctggcctggctcctagagccggggctttaaaagaaacttttccggagatgctttaaaaaatgaaaacttcccaaggaccccttttcctgtctatctgcataaaataatttcttttattatttatttatttatttatttatttatttatttatttatttatttatttattttgagacggagtctcgctctgtcgcccaggctggagtgcagtggcgcgatctcagctcactgcaagctccgcctctcgggttcatgccattctcctgcctcagcctcccgagtagctgggactacaggcgcccaccaccacgtccggctaattttttgtattttcagtagagacgggatttcaccgtgttagccaggatggtctccatctcctgacctcctgatccgcccgcctcggcctcctaaagtgctgggattacagaataatttcttaataactcctaccacattcctccctgtggcgatatcaaactaactgctgttaggaggctttgggcgaccattgcttctggctacttcctgctgaaaaggggcgtctaatggagaacagcagctagggctcctcctggggttgatctaagggtcctcggaagaatggcgtccatgtgtggttcagtttacagcaccgtttggagtttgattgcttctaggcgagaagaaacaattcaagttatagtattgagtatacagagtccaaatatcaatacaagacatataagcaagagagtgcttaataaaggggttaaccaattccataaagaagactggaagtaattaaagagggattgtagccactcggggctgaagcccacattttccctgagcctgtcaataattttgatttgatttttaagtccctgtagatttgcctcttctttactacaggtgttaatcccaaagaagcatgtttcatttaaaaatgcattactggccaggcgtggtggctcgcgcctgtaatcccagcactttgggaggctgaggcgggagcatcatgaggtcaggagtttgagaccagcctggcctacatggcaaaaccccatctctactaaaaatacaaaaaattagccatcgtggtagtgggcgcctgtaatcccagctaattgggaggctgaggcaggagaatcgcttgaacccgggaggcagaggttgcagtgagccgagatcgcaccactgcactccagcctgggcaacagagcaaaactccatctcaaaacaaaacaaacaaacaaacaaacaaaaactgcattactaaatccaataaaaagtcctagtagactcagtgatagtaaaactttcatgcttcctttttgccagtaactattatccctgctataaggatactaattaagcaaaatacgacagcaatggaaactctgtccaatatttcagttagaaggtgctaccatggataaccctattgcaaatagtagagtgaggaaagcagttcccacaaatgtggtgtggtaggtaatttccatctaaaattttacttgccaacatatagaattcccctctgtgggcctacgaagttccttggttttattttcccaaacaaagaaacctccgggttacaggtaccttacttactttcattacctggcacaatttgcaaaataattgcccagaactagcatattgattcacattttcacattacccatccctttttcccccccaccaagctgcagaagatcaccacttgattcacaggaataagcagggccagggttagtctaaaatgtaggcaaaaagcttaaaaacaattaatgagactagggtttaatgacaaatgtatgataagctttggagcaaaatttttctctccagtcctcatttttggtaaaaactaattatgaatgaactttaatcttatacttggcctgattatttgcatgaagtgcagcaagaatggttatttctacataggacttttggattggctttgatgaaacactgttccacaaggaatttcagattagacttttaaagctgagcccagacatgggtttgtatcctctaatacctgtgagttgggttatcctctcctcttgaggtcccaagataaactcagagcttccagacctgttagaaagtgacattcttcactgaccacaggttaggaaccctgtgtggggactgtgtagacaaggtgtgaggccagttctccccaaggggcttttattggctctgcatgtcaagcttgattccttaaagggaaacacaccctttcagttaaagccttggcaaaataaccggtttttccaattgtgttctgttgacaaagaaaaatggattcttgctgcactgatgcgaacaactatattgccgtaagttaagagtacttacagatagtctccaaattttagaggaaccaggcagagaaaaatgaacatgctccaaattttgttcacagtagtataccttacttgattattaaaggccataaatagtttaaaataagtttcctttcccagtccatgcaccaaaatgatacggctctgatgagtggaggaacaacagggttcctggtcctcatgctggtttagataaaatgacacagacacatgtggagtggttttaaggagtggagagtttaataagcaagaaggaagggagaagagagaaggaagacgctcccccttgcagagacggagcgggggttccaaagctgaaagaggaggtcccccacattaacaatttttaaaataccgtacaactgcagaaaatgaggactgcctgtacatactgtttgacactttgtttttttttttaacttatcaactttattttgtttgtttgttttggttttgggtttttgtttgtttgtttgttttggagacgagtctcactctgtcagccaggctggagtgcagtggcacaatcccagctcactgcaacctccacctctcgggttcaagcaattctactgcctcagcctcccgagtagctgggattacaggtattcgccaccacatccagctattggttttggtttttgagacagggtcttgctgtgtcacacaggctggagtgcagtggtgtgatctcagctcactgcaacctctgcctcccaggctcaagtgatcctcccacctcagccttccaagtagctgggactacaggcatgcacaccatgcgcagctaattttttctattttttgtggagacggggtctcactatgttgcttaggttggtcacaaattcacagcctcaagcagtcctcctgcctcaccctcccaaagtgctgggattacaggcatgagccaccacatccagccttaccagctatattgaagtataatttatataacataaaatttgccttttaaaattatacagtgcaatgcattttgacaattgtttacatctgtgtaaccaccatgcaatcaaaatatagaacatttctataaccttcaaaagttccctcatgcccctttgcaatcaattcactacttctccagctccaggcaacaactggtctgcttcctgtcactataaattagtgttgcctctttcagaatttcatctaaatggaatcctataacatatactattttgtatccatcttcttttactccaaagttcttgaaattcattcatgttcctgtgtgtatcagcagcgtgttccatttgattgttgagcagtattgcattgtgtggatatatcacaatgtgttcattcattcaactgttggtggacatttgagttgtgtccagtttagtgctattctgaattaaagtgatgtgaacaatcatgtacaagtatttttgtaggcatattttttttatttctcttggataaataccccaaaacagaattgttttgggggtcatatgaaatgggaagtatatgcttaactttataagaagctgccaaactatttttcaaaatggtaatatcactttacattttcatgagcaatgcataaagcgttccgcttgctacattttctcaccaatgcttcctattgtcaattttttaaattttagcaattctagtgggtgtgtgatactatctcattgaagtttcaactgtttttccctgttgactagagacactgagcaacttttcatgtgttgtctatttgtatatcttcttgaagcattcgttcatctttaactgagctgaacgccttcttaaaattgagctatgggagttttaaaatatatccttgtagctgggcgtgatggcaggtgcctgtaatcccagctactcaggaggctgagacaggagaatcgcttgaacccaggaggcggaggttgcagtgagccgagactgcaccactgcactccagcctgggcaacagagtgagacttcatctaaaaaataataattatacatgtaattatatatgatttttatatatgtaatatatatattcttgatgtgagctctttgtcacatacatattttgtggatattttatcccagactatgacttgtcttttcattttcttagttgtgtcttttgaagagcagaagatgtaattttgataaagcccaatttattttttcttttatagtttgtatttcttatgtcctattcaaaaactccttgcctactgaaaacttatgatgattttctcctatattttcttttagaagttttatagttttaccatttataatttggtctatgaatccttttgagttgatgtttatgtatggtgtatggtgtgaggtaacaatgaagattcatatttttttccaaaggaatatccaattgtctctttggaaaaatatgctgagaaggctatcttttccccaccaaataatcttagcaccttaatcaaaaatcatttggccatggacatatgtaggtgtgggttttttctgggctctctgtgttagatggatagatagacagatacagatatataactgtgtttacacatatgtaactgtaaacacagttatatatctatatatccaccaacagttgaatgagaataaactattgttataagcatatatacacattgtatatatatgtgtacatatacatattgcatatgtatgtatacatatatacacacaaagtatatatatgtatgtatacatatatacacacttaaagtaatggcctccagttcgatccaagttgctgcaaaggacattatttcatgccttttcgtggctgagtaatattccatggtgtatatatatatatgtgtgtgtgtatatatatgtattatgtatatatatatgtgtgtgtgtgtgtgtgtgtgtatatatatatatgtgtatatatatataccacattttctttatccactcattagtcgatggggacttaggttggtttcacatttttgcaattgtgaattgtgctgctataaacatatgtgtccaagtgtctttttcatataattacttattttcctttgggtagatacccaatagtgggattgctggattgaatggtagatctgttttttgctctttagagaatctccatactgttttccatagaggttgtactaatttatattcccagcagcaatgtgtaagtgttctcttttccccacatccacaccaacatctattgttttttgactttttaataatggccattcttgcaggaccaaggtggtagctcgttgtggttttaatttgcattttcctgatgattagcgatgttgagcattttttcatatgtttgtgggccatttgtataccttcttttgagaaatggctatttgtgtcctttgcctactttttaatgggattgtgttttatttttcttggtgatttgttagttccttgtagattctggatactagtcctttgtcagatgtgtactttgcaaagataatattttggatgttatatttccattataatttagttcaaagtattttctaatacaccttgcaatttcttctttgacccatggattattttaaagtttgttattttgtttgtttattttgagacagagtttcactttttttgcccaggctggagtgcagtggcacaatcccggctcccagattcaagcgattctcctgcctcagcctcccaagtagctgggattacaggtgcccaccaccacacccagctaatttttttttcttttttttttgagacagagttttgctcttgttgcccaggctggagtgcaatggcacgatctcggctcactgcaacctctgcctcctgggttccagcaattctcctgcctcaacctcctgagtagctgggattccaggcatatgccaccacgccaggctaattttgtatttttaatagagacggggtttcttcatgttggtcaggcgggtcttgaactcccgacctcaggtgatctgcccgccttggcctcccaaaatgctgggattacaggcatgagccactgcacccagtccaattttttgtatttttagtagagatggggtttcatcatgttggccaggctggtcttgaactcctgacctcaggtgatccgcctgcctcggcctcccaaagtgcagggattacaggtatgagccaccatgaccagcctaaagtgtattgtttagtcaccaaatatgtaagtattacccaaatatatttgtcactgatttctaatttaattgtattgtgatccaaaaatatacattgtatagtttctattcttttaaattcgttaacatttcttttatggcacagaatatggtctatcttggtgagtgttgcttacacacaactgtgtaactgaaaactgtgtattctgcttctcgtggttgttgtatcctataattgtcaactagatcaagttagtaagagtgttgttcagtgatcttttcttcttcagtgtttactgtatttgctaatcccatccagtgaagtttccatttcatatattgtatttttcacttttagaagttccatttgactctttcatttccatcctcaattatcttcatatttttctttaaatttttgagcacatttataatggaggttttaaagtccttgtctgctaattttgtcacctctgtaattcctatgatgattttcttcctggcttggggtcataatttgttgcttatttgcatgtctaataatgtttttattggacagcagacattgtaaatgttatatttttgagtgtttggattttgtctttctttaagaactattgcagtttgttttggaaggctattatgttttttgcagatcaggttgatcttttcaaggcttgtttttaagctttgttaggacaggtctgtagtaacttttgccttgggctaatttagacctaccacttaattctgacttttttgattaatctgagtgttcagcagggtctctttattatggctaaatgaaattcaaacattttccagccctatgtgaccatcaagaattcagctaatagctccctggcagttcttcgcccagctgcagaaaagtgtcagtgcactctatgtatgctcagattattatttagccaaagacttggggatccatattaatattcctggagttctttgtgtagctccattctctttagtactctatcccataaattctggctgcctcaatctcctaatctccccaaactctaatatctattcctcaactcagcaaaaccatggtgttattcttggatttcccctttcctgccccacagtctgaaagttgtctccaggcaaaaaaaatggagatcctagtttgcggatcctcatttccttctccttttttttttttttttttttttttttttgagatggagtctcgctctgtcacccaggctggagtgacgtggcgtgatctcggcttactagaaactccggctcccgggttcatgccattctcctgcctcagcctcccgagtagctgggactacaggtgcctgccaccatgcccggctaattttttgtattttgtttagtagagacggggtttcaccgtgttagccaggatggtctggatgacctcgtgatctgctcacctcggcctccaaaagtgctgggattacaggcatgagccaccgcgcccggcctgcttctcttctcttatgggttagaatcctgcactgtcttttgaacaaatgtctaaaagcttttatcacacattttgatccacttcccagttgttatagtggtatatctggtttcacatgactgaaaggaaaagttttcaccttgctttttgtactaataatatatcctggaaatcattctatataaatttatagaaatcttcatttttaaaatagcttcataaaactccattgtaaaaaccaggtgcagtggctcatgcttgtaatcccacactttgggaggccaaggcgggtggatcacctgaggtcaggagttcaaggccagcctggccaacatggtgaaactccgtctctactaaaaatacaaaaattagctgggtgtggtggtgggcgcctgtagtcccagctacttggaaggctgaggcaggagaattgcttgatttcaggaggcggagattgcagtgagctgagattgcgccactgcactccagcctgggctacagagcgagactccgtctaaaaaaaaaaaaaagcaaaaaaaaaaactccattgtatgtgcacatatcattatctgttcaacccatctatgacttgtcatttaggtagtttccatccaatatttttgcaatataaaaaatgctaatgaagaacctgagatatatatatatctatatatatagatatatatgtttgttgttgttgttgttatttttgaagtatgtacgtataataaattcctaatagtgtgattgctgcatcataaggtaaaggcatatgtagttttgttaaatatagctattccccatcttgcattcctacaaatagatgagaatgtccattgtcccatagtctcctttgcagagtatattgtcaagctttttaattgttgccaacctgatgggtaaaaagatatctccaaataattttaattaaaatttctcttattatgaatgaggttaaatagtttttcatatgtttaaaagccagtttatatctttttgtttttttagagacaggaatcttgttctgttgcccaggccaaattgcagtgatgcagtcatagctcactgtagcctcgcactcctgggctcaagcaatcctcctaccttagcctcccaagtagctaggactacagatggatgccaccatgtccagctaatttttttatttttttgtagagatgtgaggtctcactatgttgcccaggcttgtcttgaactactggcttcaagtgatcctcccacctcagcctcccaaagtgctaagattacagccatgaaccaccacaaatgaccctatatatttttttgaattgtctgttcatgtcttattttcatttttctagtagttttttttttaagtgttttagcctaaatttgtaaaaagtttaggggatatatgaagggactctaaatgtttatgaagaaatttaattaaaagataaaaataaaaatataagctttatttttcaacatgagctccatcaagttcaaggcacttttgtaagcaatgatactagccatttagttcacccctaaagaactgagagtcctgggaatttagccatgtcaatgcagtattttttatattggttactgaagaaaaaatgggtgccctttaaagttgtaagattaggaacaaaaacaagtcagaagaagccaaatcagcactgaaaggtgggcacttaatgattacccaagaaaactctcaccaaattgcccttgcttcatgagaggaatgagcgggagcattgtcgtggtcaggaaggattctggggaagttttcccaggcattttttctgctgaagctttggtaactttctcaaaacactctcataataatcagatcttatcactctttggccctccaggaagtcaaccagcaaaatgctttgaacatcccaaaaaagcgcttgccatgacatttgctcttgaccagtctgcttttgcattggtcaaatgccaccacttccacctcttgtgctttgttttcaggatcagactggtaaagtcatgtttcatctcttgttacagtttttttttttttaagaaacccttcaggatcttgatcacatttgtttaaaatttcaactgaggctgggcccagtggctcatgcctgtaatcccagcactttgggaggccgaggcgggcaaatcacgaggtcaggatttcgagtccatcctggctaacatggtgaaaccccatctctactaaaaatacaaaaaattagccgggcatggtggcaggcacctgtagtcccagctactcgggagggtgaggcaggagaacggcatgaacccaggagacggagcttgcagtgagctgatatcatgccactgcactccagcctgggcaacagagtgagactccagctcaaaaaaaaaatcaagtgaaaactctggtcttaaactgcagctgatctattttatttttattttttttcagacacagccttgctctgttacccaggctggagtgcagtggcaccatcatggctcaatgcagccttggcctcgtgagctcaagcaatcttcccacctcaggctcccaagtagctgggactacaggcacatgctaccatgcctggataatttttttgcagctaatctagatgtaatggttttggcacccatctaatggaaagtttgctcaactttaatttttcagtcagaattgtgtaagctgaaccgagatgtctatggtgttggctattgtttctgctgttaattgtaggtcttctttaattagagcacagacaagatcattttttttcctcccaaattgatgtagatggtcttttgctgtgggcttcatcttcaacattgtctcatcccttcttaaaacaagctagctacttgtaaactgccgttttctttggagcattgtctccataaacttttcacaaaacatcagtgatttcaccgttcttccactcaagcttcatcataaatttgatgtctgttcttgtttccattttagcagaattcatgttactctgataggggctcttttcaaactgttatcttattcttcttagtgcctcaaactagatcctattcagacatggtataacaagttagtatgggtttattttggtgcaagaaatattttgaaatccacacatttttttcataatatgcattttccatgaagtttttgaaaactccttgtattaggaatattagtcctttgtccagtaaacagactgcaaatattttctcacagctcatcatttaccttttggcatttttttgcaatgcaatttttttccctttgtttttgttttttgtgtaatgaatcaatgttttcttttttttttttttttagaccaagtctcactctgtcacacaggctggagtacaatggtgcaatctcagctcactgcaacctctgcctcccaggttcaagtgattctcatctctcagcctcccaagtagctgggattacaggcacatgccaccatgcctggctaatttttgtatttttagtagagatggggtttcaccatgttggccaggctggtctcgaactcttgacctcaagtgatccactcacctcggcctcccacagtgctgggattagagacgtaagccactgcccccggccaaatcaacgttttcttatattgcatttaggttttaagtcatagttagaaagcctttccccacacctaggttatagaaacattcattacttttttcttccagtgctagtacttgcatggtttttggtttccacatttagatccctgatctaattggagtttattcttttgtgtgctgagatatggatctgattatatcttttttcccaaatggctatccagttgtcccaatgccatttattaagcacttcatctttgtcccagtgatttgagatagcatctttatcatgtaccaaacttctatagtgccagaagatttttattttttttagacagggtctggctctgttgcccaggctggagtgtagtggcacaatcccagctcgctgcaacctccgcctcacatgctcaagtgcccgcacctcagcctctcaagtagctgggactacaggcacatgccaccacaccaggctgatttttatatttttttgtagaatgagatttcaccatgttgcccaggctggtctcaaactcctgagctcaagaaatccgcccacctcagcctcccaaaatgctaggattacaagcatgagccaccacacccggctgccagaaaattttaatgatcagaaaaccacaattctttcttcctctgttatatgttgaagtaaaatacttcatttagaaaactaagccgggcacagtggctcacacctgtaatcccagcactttgggaggttgaggcaggcagatcacctgaggttaggagtttgagaccagcctggccaacatggtgaaaccctgtctctgctaaaaatagaaaaatttgctgggcatggtggcgggtgcctgtaattccagctacttgggaggatgaggtaggagaattgcctgaacctgggaggcagaggttgtggtgagccgagaccacgccattgcaccccagcctgggcaacaagagcaacggtaaactccatctcaaaaaaaaaaaaaaaaaaagaaagaaaaaagaaataactcagccatacaaggctacccatttggtgagaactaataataagttagatagcaaggtaatagcaaaatgtgggtgcaaaattaaagcaagttatttctgaggagaatgtaggtctcatggaagattttcatgtggacaaatttagtaaattttttgcaggtagtttcctgacatatttaacatttgtgatatagtaaacaataagaaggtactaaaggctgggcgcggtggctcacgcctgtaatcccagcactttgggaggccgaggtgggcggatcacaaggtcaggagatcaagaccatcctggctaacacggtgaaaccccgtctctactaaaaatataaaaagttagctgggcgtggtggcgggtgcctgtagtcccagctactcgggaggctgaggcaggagaatggcgtgaacccgggaggcggaacttgcagtgagccaagatcaagccactgcactccagcctgggcaacagagcgagactccatctcaaaaataataataataataataaggtactaatatgatccagactagaagagaatagcactaaaatgggagatggggtaaacctgtggttttttttaccttaggcttttgacttccaaaattattgtttttgctgggtgcggtgggtcactcctgtaatcccagcactttgggaggccaaggtgggaggattgcttgagcctaggagtttgagaccattctaggcaacaaagcaagaacctgtctctaaaaaaatttaaaaattagccagaaatggtggcacatgtctgtagtcccagctacttgggaggctgaggcaagaggattgcttgagccttttgaagttgaggcttcagtgagccatgatcaccccactgcactccagcttgggcaacagagcaagaccccatctcaaaaaataaaacaaaatagactgggcacgatggctcacgcctgtaatcccaccactttgggaggctgaggtggatggatcatgaggtaaagagatcgagaccatcctggccaacatggtgaaaccccgtttctactaaaaatataaaacttagctgggcgtggtggtgcacacctgtagtctcagctactcgggaggctgaggcaggagaatcgcttgaacccgggaggtggaggttgcagtgagccaagattgtgccactgcactccagcctggcgacagagtgagactctgtctctaaataaataaataaataaaacaaaataagtaaaataaaataaatgtttgtagttccaaaatattttgatgacataatttcttcttgttctaataaaactacatatgcattggtcctatgacctagtaatcacactattaggaatttatcataaatacacacctcaaaaattacaaaaatacatatataccagcttatttattacagcgttatttgtaattgcaaaaacattgtagatagaatggaggtcacataaaacttattcttaagattcagaccgggtgcaatggctcacgcctgtaatctcggcactttgggaagccgaggcaggcagaccacccgaggtcaggagtttgagaccagcctggccagcatggtgaaaccccatctgtaccaaaaatacaaaaattagctggtcgtcgtggcacgcctgtaatcccagctactcgggatgctgaggcgcgagaactgtttgaaccccggaggcagagactgtagtgatctgagatcatgccactacattccagtctgagcaacagagcaagacttcgtctcaaaaaaaaagatcatagatcatcttatcaaatcaaagtatgcaaaatattcaagtaaacttcagataaatatgaaggctaaaccattcagcttcttcaccaaacccttgaatgtcccacctgtctaaatggagatacatgtttgtttgatttattggttaactgtttttattccatttttcctcaaatgatcccataatttgaccttaggaagctgttcaaatagacacattaggttgaatggaaagactactcgatgatatttaggattttaagaggattttatgtattttttccttgtgtgcaataatttaatagcatcttgaataggattttctgatattactaaccctctgggaataatattaggtaattagacagttagctaatattaaaatatgtatcaggtaatatttattgagagtttcctctgtgccaagcaggatcaacttcataggcaggcgacctgtgcggggacacagggcttcatgcttagataggcccccttgctttgaaggcccctaccctttggttagggctctgctgttaccatcttgaaattcttaataatttttattttatttttttgagtcagggtcttgctctgtcgccctggctggagtgcagtggactcactacagtcttgaattcctgggctcaagcaatcctcccacttcagccttctgagtagttaggacgacaaacacacgccaccatgctcagataagttttttgtttgtttgtttttttgtttttgtttttgttttttgtagagatgggactgtccctatgttgctcaggctggtctcaaattcctggcctcaagtgatcctcccacctcagcctcccaaagtgctgggactacaggcatgagccactgtgcctggtcaatcatttttattaacaagcccaagccctcttttttttttttttttttttgagacagggtctccctctgttgtccaggctagagtgcagtggtgcgatcttaccttcactgcaacctctgcctcctgggttcaagtgattctcctggctcagcctccctagtagctggaattacaggcacccacccccatgcctggcaatttttttgtatttttagtagagatggggtttcaccatgttggcaaggctggtctcaaactcctgacctcaagtgatccacccaactcggcctcccaaagtgctgggattacaggtatgatccactgcgcccggcctccaagccccctatttttattttgcactgaccctacaagttacgtagctaggcttagttatgtttttagcaaggaaagtgtataatctcatgtaccttttgaaagattactcaggtctctgcatgtgaaatggaatttagggaatgcaagagagggagtaaaaataacagcgaggaagctatgatagcatttaaggttgctttgactcaggggtagcagtagatagggtaagtaattgatagtttcaaaatatattttgggagtagtaagcattggtatggattagtaatatactggatgtggggatgcagaaaaaaatattaaaaattacttctgaaattctggctggaatagaagtgccacttaccaggtaaggaaggttggagacataacatatttgagggtgtggtcaaaagatgagtttgacattatgctatgtcatataaaagacatataaaagactacctattttataattcctttttaataaaatattcagaaaaagcaaaactgtggttgcctgaggctgaagctaggaagattgactacagacaagcatgagggaaattttgggggtgatgagagttttctaaaactggattgtggggttggttgcattactgtataaatttattaaaaatccctgcatcgtataggggcactatattgtatgtagaaagctgtgaaaagattttaaaaatgattgacatgtctgtggttatatcaatgagtactattattattcccattttatacataaagaaaataaaagagaagttaaaaataaaagtttcatggttacatagctactaggtgtaatatccagtattggaatttgaatctttttgacactaagaccttactctcgatcatataatacattcactttctattttaaagttatattatagccgggcacagtggctcacacctgtaatcccagcactttgggaagccgaggcaggcagatcacgaggttgggagatcgagaccatcctggctaacacggtgaaaccccgtctccactaaaaatagaaaaaattagccaggcgtggtggcacgcacctgtatcccagctactagggaggctgaggcaggagaatcgcttgaacccagaaggcagagcttgcagtgagacgagatcgtgccactgcactccagcctgggtgacagagtgagacaccatctcaagaaaaaaaaaattatattataaatgctgcatctcattggtcagaagctctcttgaaattataaaacaaagaagaaaaaagataaagactgggaaattgtgttgaatcagtatataaatcctgtatactggtccttccatttcccctagaaataagtgatacaggccaggcgctgtggctcacacctgtaatcccagcactttgggaggcggaggctggcagatcacctgaggttgggagttcaagatcagcctgaccaacatggagaaacccccgtctctactaaaaatagaaaattagctgggcatggtggcacatgcctgtattcccagctactcgggaggctgaggcaggagaattgcttgaacccaagaggaggaggttgtggtgagccaagattatgccattgcactccagcctggggaacaagagtgaaactcaaaaaaaaaaaaaaaaagaaagaaaaagaaaaagaaagaaggaaggaaggaaggaaagaaagaaagaagtgatacaacaagttacagcatctttgtttattatccactgtgagttgtattaccacactttacttggctctttggcaaactatattatctcttcagatcactagggctaggaaggcccactggtaacttgaaggagtaaatgtatcttctaaaaaatgcttacttccagggagattggatccacacaagtgaatacatatatagtccttagtgtatgctatgattattttactatgtcagtagcataaagattgctatattaataagcattaagtgcctgctgtgctagacagtgaggatgcaagtggccaccaaaatagcatggtccctgccctcctggagcttctttttttcttcttcagtgggggaagcagatactttgcttatgcaaaaataattataaaatttaaagttgtgccaagttcaatggaaaaaatataaggtgttctgagagagcataacaaaggatcctggttttaactggggcctaatggaagacctctattaggaaataacatttaaactaagaccagacagacctgtagaaattagcaaagcaaagggagggaggaaaaagcagctttcctggcaaaggaacaatttgtgtgaaggccctgagacagggaagggctggggttctgaccaccctccaagtggtgcaatggaatatagtgagagagggagaagacatgagaacttggatactatgcaaaggatttggtattttaattcaagagcagtatgatgctactgaggagcagctggacaattgtgtgatccaattaaaattttaggaagatgaacctcgctattgtggagaatgcatacacaagggttctgttggttcatgaagaggtcttaagaaaactatgagctgggtgcagtagctcaggcctgtagtcccatctacttagaagtctgaggcgggaggatcccttgagcccaaggagctggaagttacagtgagctatgattattccactgtactccagcctggatgacagagcgagatcctgcctcagaaacaaaaaccaaaaaacaaacaacaacaaaaacaacaacaacgaaaatctcagaaaactacaggccttattatcaagaaaatgacaggccttattattgagaaaactacttacatttttaaaagctgattttcaaaaaccagattgtgaattaagtgatgctgaataggggaaaaaaagactgataaaccagtgtatctctgaataacccactagatcagtgcttgtcaaactttaatgtgttttcaaatcaccctgatgttttgttaaaatgtaagtcatgtctcagtaggtctagaggagggcatttctgcatttctaacaagctccccggtgatgcctagaccattggtcctcacactttgagtagcaagtgattgggctatactctttattctaaattctaaatgtattctatcttctaatgcctatcagccctcttgctggtctggctaattatcaaacttgagcatttaaaactgggggttttcagagattaattgaagtgttaaagacatggaaatataggtcacatatggcttttcatctcttccggaaatatcctatatatccttacttcttttctacctacctaacctatgtgcctaccccttcacttatgttcaaggttctattatacttcaaaaggactctatgcaatcaaagtgatgtccaagacaaatatacagaaatagtatgaggctctaacactttacatctaatggagtggtttgcatcattaattgaggcttactctgtgccaggcactttacctgccttcttcatttaataggataggagcaggaactcttagaggttcatttcttgttcaaggatatacatctcatctctggcttatatcacagtggactcttttattcactatcctaatcattataattttgtttggtgacaacaattctaaatgcagaaaagttaaggctctttattctgtgactaaaggctttgtattttctaaagatttgtggagctttgctgccattatttcaataattttataaagatcctaggtggtaaataggcctggctttttttctttttgaaatcttctccgtcttcttcttcattagcagtgcaacttcttgtggcatatggtacccaagatcttgggaaaaggattgatcaagtaaagggaaacgatagagagagtgtgctctacaactgagatcatgctccttgtgaaagacagggtagggaaatttcttattgctccctggttcttaagaaatgagagctaacaatgacatccagttttaaaagaaataaaatctgaattgtacttttaaattttataagccagagttaaaccaatagattgtaactcctgctaatttgatagtagctccagataatgaggaagtgacagggaatgctaatttcatttggtaagagataaaactgaaattattaatgtctccacggaaatgctaaatgcctccttacaagtagggtccggctaattgtctgtcttccaacaagccagatttgttggtgtttttccagacaatgttgtgtagttttcggtttggttcgatcccctttcttgtgatcaaagaaagtgattcaaatgtttaatgagtcttgatttggattggagacttgcagaacggctagcctcacagccccaaggctggctttccctaaggtaggtttcctatgcaccgatactggcaaggcgctttggctggaaactctggaaggaagccaaaggaaagtgaagttcctggcgctagcgcgtgtcctgctcagagagcccggcgctagctcattcttcgtgcagttattggctgggactctgtgtgccgctgtcggccaatgaagacgctggagatcgggcccctgcccgtcccctttctgcgccccgggatgaggcagagactgaacagccggcgagcaaatcaacggcatccagaaagccatgtcggactcggcgcccagcgcccaagcgctaacccgctgaaagtttctcagcgaaatctcagggacgatctggaccccgctgagaggaactgcttttgagtgagatggtcccagaggcctggaggagcggactggtaagcaccgggagggtagtgggagttttgcttctgcttggtgccttgaacaaggcttccacggtcattcactatgagatcccggaggaaagagagaagggtttcgctgtgggcaacgtggtcgcgaaccttggtttggatctcggtagcctctcagcccgcaggttccgggtggtgtctggagctagccgaagattctttgaggtgaaccgggagaccggagagatgtttgtgaacgaccgtctggatcgagaggagctgtgtgggacactgccctcttgcactgtaactctggagttggtagtggagaacccgctggagctgttcagcgtggaagtggtgatccaggacatcaacgacaacaatcctgctttccctacccaggaaatgaaattggagattagcgaggccgtggctccggggacgcgctttccgctcgagagcgcgcacgatcccgatgtgggaagcaactctttacaaacctatgagctgagccgaaatgaatactttgcgcttcgcgtgcagacgcgggaggacagcaccaagtacgcggagctggtgttggagcgcgccctggaccgagaacgggagcctagtctccagttagtgctgacggcgttggacggagggaccccagctctctccgccagcctgcctattcacatcaaggtgctggacgcgaatgacaatgcgcctgtcttcaaccagtccttgtaccgggcgcgcgtcctggaggatgcaccctccggcacgcgcgtggtacaagtccttgcaacggatctggatgaaggccccaacggtgaaattatttactccttcggcagccacaaccgcgccggcgtgcggcaactattcgccttagaccttgtaaccgggatgctgacaatcaagggtcggctggacttcgaggacaccaaactccatgagatttacatccaggccaaagacaagggcgccaatcccgaaggagcacattgcaaagtgttggtggaggttgtggatgtgaatgacaacgccccggagatcacagtcacctccgtgtacagcccagtacccgaggatgcccctctggggactgtcatcgctttgctcagtgtgactgacctggatgctggcgagaacgggctggtgacctgcgaagttccaccgggtctccctttcagccttacttcttccctcaagaattacttcactttgaaaaccagtgcagacctggatcgggagactgtgccagaatacaacctcagcatcaccgcccgagacgccggaaccccttccctctcagcccttacaatagtgcgtgttcaagtgtccgacatcaatgacaaccctccacaatcttctcaatcttcctacgacgtttacattgaagaaaacaacctccccggggctccaatactaaacctaagtgtctgggaccccgacgccccgcagaatgctcggctttctttctttctcttggagcaaggagctgaaaccgggctagtgggtcgctatttcacaataaatcgtgacaatggcatagtgtcatccttagtgcccctagactatgaggatcggcgggaatttgaattaacagctcatatcagcgatgggggcaccccggtcctagccaccaacatcagcgtgaacatatttgtcactgatcgcaatgacaatgccccccaggtcctatatcctcggccaggtgggagctcggtggagatgctgcctcgaggtacctcagctggccacctagtgtcacgggtggtaggctgggacgcggatgcagggcacaatgcctggctctcctacagtctcttgggatcccctaaccagagcctttttgccatagggctgcacactggtcaaatcagtactgcccgtccagtccaagacacagattcacccaggcagactctcacggtcttgatcaaagacaatggggagccttcgctctccaccactgctaccctcactgtgtcagtaaccgaggactctcctgaagcccgagccgagttcccctctggctctgccccccgggagcagaaaaaaaatctcaccttttatctacttctttctctaatcctggtttctgtggggtttgtggtcacagtgttcggagtaatcatattcaaagtttacaagtggaagcagtctagagacctataccgagccccggtgagctcactgtaccgaacaccagggccctccttgcacgcggacgccgtgcggggaggcctgatgtcgccgcacctttaccatcaggtgtatctcaccacggactcccgccgcagcgacccgctgctgaagaaacctggtgcagccagtccactggccagccgccagaacacgctgcggagctgtgatccggtgttctataggcaggtgttgggtgcagagagcgcccctcccggacaggtaaggtttagcaagtcatgcttgaccctgttagtgcttttttattcctacatcatattgaggaaggaatggagctgtttttttagtgatgaagatgttttcctggtgatgcattcacactttcaactggcccttcctagatcaaagttagtgcctttgtgagatggtggcctgccagagtgtggtttgtggtcccatttcagggggaagatacttgactcatctgtggacctaattcacatcctcagcactcttttgctatcacaactaaccaatcttgctaagggatggttaagctaaaacacaagatctcagcgatcagagtttagcttggtatcatttacattaggaataagctgctggatacctctaaccagtggcagcttctaggaatacaaaaactacctcattcctccacctttcaagtgattgtgacatttgtattaaaactaatagctttttgataattttcctttgtttatacagatcgtgtacctcattctcagataattttttatgaatgaaatgaaattccaggcatcctttaaattttatttcaagcattctactggaaatgatgtgcaccctgcttacaaaatatttttaccttataacagtaatgcatgtttgctagaaaattcagaaaatacagaaaagtatttaaaaaattaaaactataatctccaaacccaaagataaccatttttaattataaaagtaataatttatttcaaaaataaatctaggcaacccaagaaaacataaagtagccagactcagtggtgtgcacctgtagttcttgctgctcagtgcctgaggtgggaggattgcttgagcccaggagttctgggctgtggtgcactatgctgatcaattgatcaatccactgtctgcactaagttcagcatgaatacagtgacctcttgggagggcaggaccatcaggttgcctaaagaggggtgaactggcccaggttggaagtggagaaggtcaaaactgctgtgctatccagtagtgggatgacatctgtgaatagccactgcactccagcctaggcaatatagggaaaccatgtctctttaacaataacaacaacaacaacaacaatcccagaaactacaaaaggagagtctttttggtgcctccagtgttagtccctgtccttccagccttatttttcttaagtatatgcacaatgtgaaaggtagataaattcatatccttagacaggtaaagcattcattaattcagggtggtatgcaaggatactatccaaggcatggtatccatgcaaggtgactgcaaggcctttgccctggagagaaccctatacatactctcaactgtaggagaaacactgttattttgttactcagtgcatcattgctatcaactcttggatttggcagttagtcaaatgaggttctaccatttaccaactaggagtctgtggccaagttactcaatctcctttctaagcctcttcctcatatgcaaaaagggaataataagtgttttataagattcatgcatgatataatgtatgcaaagtgtttagcatggtgcctggcatatcataactgttaaacaattattagccagctcctagcattttgggaggctgaggcaggcggattgcttgaggccagcagttcaagaccagcctgagcgacatagtgagatcctgtctctacaaaaaaaaaaaaaaatgtgttttcattagctgggtgtgttggcatgcacctgtggtaccagctacttgggaggctgaagtgggagaattgcttgagcctgggaggttgaagctacagtcagctgtgattgcaccactacacttcaaccatggcaatagagtgagaccctgtctcaaaaaaaaaaattatcagctattactataattatttttattagttcctcactcacctaaaatctcaaacacaccttagaaatacacatatgagaacaaccaaaaatgacaaagtagaagcacatatgaaaaggctaagaaagcatgaaagccagcaagaaataactgccgctcttctggtcagcctggaaagcaactggcattttccctagaacaatgttttcaaacttggttgcacattaaaatcacctagagaccttttaaaaattctgaaacccaggccacaccccgacaaatgaaagcacagtctctgggggtgggacataggcatcattttttgaaggtccccacttgatcctaatgtgcagacaaatttgaaaaccacagctttgggaggctgaggtgggtggatcataagatcaggagtttgagaccagcctggccaatatggtgaaaccccgtctctactaaaaatgcaaacattagctgggcatggtggcgcatacctgtagtcccagctactctagaggctgaggcggaagcatcagtgagggagaatcagtgaacccaggatgtggaagtttcagtgagcccagatcacaccactgcactccagcctgggcgacagagcgagactccacctcaaaaacaaaaagaaagaaagaaaaaagaaaagcagtactctggaacctaccaatccatcatttagcatatttgtgaagtaaagtgttattctggtatttgcagaaccagaatccagctttattgggccaggcccaatttttttaaaaaacatggtaaggtctcccagccttaaagtattacatagcatagctctaaaagatcactgtaggaagacataaaatggtatttcagtcatctaagggaaaaaccttcctaaagcactagcccctggacaactattatttaaacatctacagctgttcaatagatattgggttctttttggagggatgtgacaaaattcttgtataattagattgtgatgatgattgtatcagtttagtacatgtaaatacactgaaaaccattggattatacactttaaatatgtgatttgcatggtatgtgaattatgtctcagtaaaaatctagagatggggctgggctcagtggctcacgcctgtaatcccagtacttagggaggctgaggccagcggatcacctgaggccaggagttcaagaccggcctggccaacatggtgaaacttcatctctactaataatacaaaaatcaggccgggcctggtggctcacgcctgtaatcccagcactttgggaggcggaggcgggcggatcacgaggtcaggagtccaagaccagcctggccaacatggtgaaaccccgtctctactaaaaatacaaaaattcaccaggcgtggtggctgaggcaggagaatcgcttgatggtggaggttgcagtgagccgagatcgcgccactgcactccagcctgggtgaaagagcgaaactccatctcaaaaaaaaaaaaaaaaaaaaaatcagccagatgtggtggcaggtgcctgtagtcacagctacttgggaggttgaagcaggagaatcgctttatctcaggaagcagaggttgcagtgagccaagatcatgctgttgcattccagcctgggcaacaagaacaaaactcactccatctcaaaaaaaaaaaaaaaatatctagagatgggagaatcatatggctggcataaaaaggtcaagtcaaagatatgtaagattaaggctttacgatgctccagttctagtaaaacagaccaggtacttgttttggtgtgaaattgccaatataagtatagtactgtacatattagttgtttagcttaggtaagtcttttaatctctttaaactccagtttcctcatctataaaataaagagaatatctactttgcaaacttgttgtgagagtgaaaagtaatgcatataaagtccctgtatggagcaagtactcaataactatttgttgaactaaaaatgataatactgatattcaccatttattagcatccctatgtgccagacactgtaaacaattaaaagttatcattctggtacccagagtacagtatgagacagacatgcaaaaaaaaaaaaaaaaaaagataatggagatctgcatagcataagatgcagtgggaccaaacgggaaaaaacacctaaatgagcctggagaaaggaagaaatgatagaggtggtgatgcttgagctatgatctaaaggttgagtagtagcttgtcagacagtaaaggggaaaggacagggcagggaggggccattgcaagaaattccatgcagagggattatggtatttcattatcactgaaccttaaactgtgtgtgtggccgggtacggtggctcatgcctgtaatcctagcactttgggaggccaaggtgggcagatcacttgaggtcaggagtttgaaaccagcctggccaacatggtgaaacctcatctctattaaaaatacaaaaaattagccaggtgtggttgtgggtgcctgtaattccagctacttgagcagctacttgagaggtcgaggcaggagaattgcttgaacccgggaggcagaggttgcaatgagctggtgtcaggccactgcactccagcatgggcaacagagagagactccatctcaaaaaaaaagtgtgcgtgtaaaacagacagtctttgtaggagatgaggtgaagcaagtaggcaggagttagatcctgagttacctttgggccaagccaaggagtttttattttattccatatagatgacagtcactgcagaaatttgaactgatatgcatatatcatgaggtttttttgttttagaaatattattctgtcagtcataagtgaagggactggggacattgggactggaggcaaagagatcttatctctttgcaatagtttgaaagctattgcaatatttgaagagaagattgataaatgcttgaaccagcacagtggcagtacagatggagggagctgactacaataaaatcatcaggacttgttgattgacatgatataggaagtgagggacagggatgagtcaaggctgatccccctagatcctgactaaggaagctgggtggttgacagtgccattcacagagacagtgaattctggcataaacacctaataggtcaggctggtttacacctccatcattcccatgggagaaggtatagaggggtgtgtgtttgtgtgtgtgtgtgtgtgtgtaaaagaacacagaaagccagattcctctttttgacaccagaatattggttcccaccatagtcaaaaggatattcctgaggatcgaggcttggaaaaatattggggaaggataagaactccagttgttgctgctttttttggcagccagtgtaacctaggtaaggacttggttgaattaagaaatttcatgtccagatcaggatggatttttctatttctctgagctctggtgtgtttcccactcagattgcaggtcgtaggtacctacggtgtgaattgtgttgtgtttctgtgcttgtgcaagggagtagctaggttgctgggaggtctggatgagggtgggggtggggtgagatcaagtctccagctccaagaggtcccctggggctaagtgaaaagcttgctcttttgaaatggtcttcgttggtaattaacaaaagatcaagaataccttggtgtcagataaagggaatttgtaggcacaatgctgttggtagctgatctcaatcattcaaggaagctattaaatctatgaacattagcattctgccaggtaaagagatctggtccttagcacctcccagacacactgattctttactgttttgaaacatctccctctcctggcttcctccaccccgcttccatactgtccttgaaatcaatgaatggtaatttagtgtatctagtgtatcactagcaaatgtctgaataagaaaggtttggtttccgctgtgtctcctgttacaatgagaacatgtactgcataaatttaattggctacgttaatgtgtaagccttttctgcaaagagatggatccgtttctgaatattctgcagaagggcagagttttgagtatatggcagtggttctaattagcagttgctccaatacaatcagactgagacggaagctactcatttagaatactggttgatgacaacactggcttgaacaaagtgaccactctccaatggctactctccctctcagtgggccgcaggttgctagggctcaggctgtggctgttttccccgccgaaaaggggcggggtcagtcggtgtgttaggaaaaaaaatgtatatatatatatatgttgtctgcctccccacagagataacaacccgtggaaaaacatgccgttgagcgggaggaaggcgaaaagataggctgggttttttggggggtgggggagcgtggaggatagggtgggctttttcccctccaatgctgcgacgcattaaccctgctgctgttgggacgttctctgctcagcctattggctgagcccgggagccgctgtctgccaatcgggtggtgaaaggcagacaaatctaccccgccaccagcaaaaacggcgcgtaacccttgcggcgccggccgaaccgcgccagagctggcgcggggaaagggagataggtgtctccagctgctgtggctgtttggggcgggtcggcttcatccgcgtctcaggagcaagtagagaattagcgggcggcagcaatgctccgcaaggtgagaagctggacagaaatctggcggtgggctacccttttgttcctcttttaccacctgggttacgtttgtgggcagatccgctacccggtcccagaggagtcacaggaagggacttttgtagggaatgtcgctcaagatttcctgctggatacggacagtctgtcagctcgcaggctgcaggtcgctggagaggtgaaccaaagacacttccgtgtggatttggacagcggagccctgctcatcaagaacccaatcgaccgagaggcactgtgtgggctcagtgccagctgcatcgtgcccctggagtttgtcaccgaaggtcctttggaaatgtaccgagcagaggtagagatcgtagatgtgaatgatcacgccccccgttttccgcggcagcagctggacttggaaattggggaggcagctcctccaggacagcgtttcccgttggaaaaggctcaggatgcagatgtggggagcaattcgattagcagctataggctgagctccaatgaacactttgcactggatgtgaagaagcgcagcgacggcagcctggtcccagagctgctcctggagaagcctttggatcgagagaagcaatcggactaccgcctggtgctgactgctgtcgatggagggaacccgccgagatctggcaccgcagagctccgggtatccgtgctggacgtaaacgacaacgccccagccttccagcaatccagctacaggattagtgtgttggagagcgcaccagcgggcatggtgctcatccagctcaatgcctcagacccggacctgggtcccagtggtaacgtcaccttttatttcagtggtcatacccctgatcgtgtaagaaacctctttagcctgcaccccactactggaaagcttactcttttggggcccctagactttgagagtgagaattactatgaatttgatgtgcgggctcgcgatgggggttctccagccatggagcaacattgcagccttcgagtggatctgctggacgtaaatgacaatgccccttacatcacagtgacctcagagcttggaaccctccccgagagtgcagaacctggcactgtggtggcacttatcagtgtgcaggatccagactcagggtcaaacggagatgtgagcctccgcattcctgaccacttgccatttgccctcaagtctgccttcaggaaccagttctccctggtgactgctggacccttggatcgagaggccaaatctagctatgacatcatggtcactgcttctgatgctgggaaccctcctctcagtacccacagaactattttcctcaatatttcagatgtgaatgataatccaccctctttctttcagaggtcacatgaggtgtttgttcctgagaacaatcgcccaggggacctgctttgctcccttgcagcctctgacccagactctggcttgaatgcgcttatctcctactcactcctggagcccaggaatcgagatgtatcagcttcctctttcatctctctgaacccccagacaggagctgttcatgctactcgatcctttgactatgagcaaacccagacactgcagtttgaggtgcaggcccgggatcggggcaacccaccccttagcagcactgtaacagttcgtctatttgtgctggacctcaatgacaatgctccagctgtgctccgtcctcgggcccggcctggttccttatgtccccaagcactgcctccatcagttggtgctggccacctaatcacaaaggtgactgctgtggacttggattcaggttacaatgcttgggtttcctatcagctcctggaggccccagatcccagcctgtttgcagtctctcgatatgctggggaggtgcggacggctgttcctatcccagctgacctcccaccacagaagctggtcattgtggtaaaggatagtggtagtccaccactctctacctctgttactctcttagtgtccttagaggaagacactcatccagttgtcccagatcttcgagaatcttcagctccaagggaaggagaatctcgtctaaccctctacttggctgtgtccctagtggcaatttgctttgtctcctttggctcattcgtggcactactctctaagtgtcttcgtggggcagcctgtggagtcacatgctttcctgctggcacctgtgcctgtctcaccagatctcgaaggagggaggggcttcccccttccaatgggatcctccgaatccagctagggtcagatgaccctatcaagtttgttgatgtgggaggccactctcatggctgtacacccttggcttctgcacccactcggagtgatagcttcatgatggtgaagtcacccagtgcacctatggcaggggagcctgttcgcccaagctgcccaccctctgatcttctctatgggctagaggtgagacctttgcaggctcaacaaatgcttgagggttattctgatccaggcatatggctaggccatgtcctagagagtactggcctctcagtaagtgcccatagtgatgtcaccatttttgtaagaggtaactatgtggtagacgctgtgctttgtaactgtttcgtgaattaaccagagttgtcacagtttagcattgggggcgggtcatgcctatatctgagtaagaaatgaaagtaattggtgatcaagagccaggctgttgtggaagcatgatgatggaatgtgggagcacaggaggctacagtgcacagggtacagtgcaccaggcagtcacttggacaaaggtggctgttttctctactcttcctgaaagaggggatcagattctgaagtaccttaactctaggttaccatttcccaagggattgaggggaaataaaatctttgtctcccagtatctagtacactgtgaagggacctctctatttgaaacatagagacagcagaaagaggagagaactaaaggaatagagaggcacgcatcagagtggtggcatagatcttttggtctgggtcttaggactcatatcaagtccctactggggatttgaactagatgcggtaaattggaaggttggggcgggttggtcatcacctttggaaaaaacagtaagtgaaatcacttatgtcagaaaactggtttacagttggctgattcatagaaacagccaccctgtgcatctttaagttgagttctcctgaatttggtgaaaccatgaaacctagaagccaagccatccatgcttggcctctgaccaccctcctgggtgacctgattcagccccagaaatgttcccctacccaaaaactgtaacactcattccacatttggggtctggggtgtcagaaaagctaagtcccatgtcagctgacattgagatttccgcaaagcattgctggagagtcagggcaagactttacaaggttcttactaatcttttctctcaccttagcagcattcagcaggatgggggagggtgggggaatacatgggctttgcctctcccagaaggacaagattttgctggttcaagcaaagtggtggaagcttctgaagtcatgcaggaagttgctgggacagaacgctgaggagttttgtatcactttgtcttccctgttgagtaccatctgagctgtcaaactttgctgccaagggggctgaatcaacctgcagcacgaagtgagtggggaggtaggaagcttctgtgacacagatttgcagcctgtgttcccaaggtttccaggattgaggaaactccataattggttgagagcacacagactttttggccaatcagactcagagctgaggtgggagatctgctcttccagcccgcctctcctcctccagctccccagctccactcaaattcagctcccctcccccctgcccacccccgccactcggtgactaagaactgctgcaagcaggcaaacctccgagcagtttttaagaggctggaaggagacataagagacttcagctgctgcattccaagccctgggtctaccttggagacaggacagcacagacttactctccacaaagggacttctgggtcatggggcccaagacactcccacagctcgctgggaaatggcaagtgctgtgcatgttgtccttgtgctgctggggctgggtgtctgggcagcttcgttactcagtggtggaggagtctgagccggggacgctggtggggaatgttgctcaggatctgggcttaaagatgacagatctgttgagccggcggctgcaattgggctctgaggagaatgggcgctatttttccctgagcttgatgagtggtgccctggcagtgaatcaaaagattgaccgagaaagcctatgtggagccagcaccagctgcctgctgccagtgcaggtggtgactgaacaccccctggagctaatccgtgtagaggtagagatcctggatctcaatgacaactctcctagctttgccacccctgagcgagagatgcgcatctcagaatcagcagcatctggggcacgattcccactggacagtgcccaggatccggatgtgggcaccaatactgtgagcttttacactctaagccccaacagccacttctctctgaatgtgaagaccctaaaagatgggaagccattcccagagctggtgctagagcagcagctggatcgtgaagcccaggcaagacatcagctggtgcttactgctgtggatggggggaccccagcccgctcagggaccacccttatctctgtcatcgtgctggacatcaatgataatgctccaaccttccaatcctcagttctacgtgtgggaatcccagagaatgcacccattggtactctgctgctccgcctcaatgccactgatccagacgagggcaccaacggccaactagactattcttttggagaccacacatctgaggcagtgcggaacctctttggcctagaccctagcagtggggcaatccatgtgttgggtcccatagactttgaggagtcacgtttctatgaaattcatgcaagagcccgtgaccagggacagcctgccatggagggccactgtgtgattcaagtggatgtgggggatgtcaatgacaatgccccagaggtgctattggcctctttggccaaccctgtcctagagagcacaccagtgggcacagtagtggggttgtttaatgtgcgagaccgggactcaggtagaaatggtgaagtgagccttgatatctctccggacctgccatttcagattaagccttctgagaaccactactcgctgctaaccagccagcctttggaccgggaggccacatcccactatatcatcgagctgctggccagcgatgctggttcaccttccctacacaaacatctcaccatcaggctcaacatttcagatgtcaatgacaatgcaccccgcttcaaccagcagctttacactgcttacatcctagaaaaccggcctccgggctcccttctttgcactgtggctgcctcagatccagacactggggataatgcccgcctcacctactccattgtaggaaatcaggttcagggagccccagcctcctcctttgtgtatgtcaacccagaggatggacggatctttgcccagcgtacctttgactatgaattgctgcagatgctgcagattgtggtgggggttcgagactccggctctcccccattgcatgccaacacatctctgcatgtgtttgtcctagacgagaatgataatgccccagctgtgctgcacccacggccagactgggaacactcagccccccagcgtctccctcgctctgctcctcctggctccttggtcaccaaggtgacagccgtggatgctgatgcaggccacaatgcgtggctctcctactcactgttgccacagtccacagccccaggactgttcctcgtgtctacacacactggtgaggtgcgcacagcccgggccttactggaggatgactctgacacccagcaggtggtggtcctggtgagggacaatggtgacccttcactctcctccacagccacagtgctgctggttctggaggatgaggaccctgaggaaatgcccaaatccagtgacttcctcatacaccctcctgagcgttcagaccttaccctttacctcattgtggctctagcgaccgtcagtctcttatccctagtcaccttcacctttctgtcagcgaagtgccttcagggaaacgcagacggggacgggggtggagggcagtgctgcaggcgccaggactcaccctccccggacttctataagcagtccagccccaacctgcaggtgagctcggacggcacgctcaagtacatggaggtgacgctgcggcccacagactcgcagagccactgctacaggacgtgcttttcaccggcctcggacggcagtgacttcacttttctaagacccctcagcgttcagcagcccacagctctggcgctggagcctgacgccatccggtcccgctctaatacgctgcgggagcggagccaggtgaggggctcggcgccgccccgggcgacccctgggggcggcactggagaagccgcccgtcctcataagggattgaacttgcatccactcctctccggccggcttggtcgctggctgcgctccacccgattctcgggatcattggaccgtttgcgcgaaaccagagtggccgattaagggatggggctccgagcaccgggggtggtggcgactgtgggcgaggggaggtgggaccgacccccacccctacactcaaaaaaggccggggcctccttcgagcttccggtgaatttcgggcgatttccgcgggtgtcgggggtcccgggaggaggcagtcacagatccacccctgcagccagcctcctaggcgccggctccggcacgcttcgccggtctgtagatttcctcttcgatttctccccagctcccagcatctgtgacttcactgttaccctccctatccccgcatcacccaaccgcacctgtctgcgggacttaggtgtgcgcgcggggctcatgcgtgtcctccctgctggccacccccacggcccacacaagttgcacgggctcgccacgccccgccaacacgtgcgcggacgcacgcacgcactcctcgcacgtgggcttacgcgaataccagctttcactgccactcgctcgcggccagattcacaggcctgttccggtccactcgcagctcccctctgccgctccctccgccgggctcaggagtactcgtagctgattgtgcgcgcctgagggtcccagatcgcggccgcccaggaccaggcgaggactccggagcctcctctcacctctcccacctgcgccccgggctgggccgggtcgcctggggggcggcctgagcgaggcgcggggccaggagcgctggagcgactgccgctctaagtgccgggcgggcaggactctacgatccttgggccagaggtccggatggtcccgggactccgtctcaagggtcggcgacccctcaacccagaagcctcgagcaggcggacaggcagagctgcccagtggccgaggcgcggcagggctccgcgttgggcgagtgagtgagcctctataggacagcaggactgggactccagtggcaccagcggccccttcctcccgcaggaagtgaaagcctcgagcgccctggctctcaacccccagagatacaggcttttggcgccgtcgtgatcacaatgtgcccagcgatctagggtcagagatttggaggtgaccaaactatctgacactctaacaagtcctgtctcctctggcagatggaaagctataggctctgccagatgccagggtgcccttatgtgtgaggaaactacaatagtaaaaaacacaagtttctccaactccaggagcttttattcaaaatatatcaatgcctaactctgctcctaggactgtattttgaaacacccccaggtgattttgatagctgattgagagaaacttactatataactcctttgagaacctcatctcatttgctcttcccaccattgctgttggctaggtactaacatgcctctcttataacagcttcacagaggtcaagtgacttgctcaagttcacagagcaagtaagagagattctaacccctgtctaactccagaatgtgtgcttttaatttcttggcacttggaactttaaaagcttgaggacaggagaggggagttgcctctgctgggattttgcttctgctgggatggggcaagggtggggttccttcccttttaggaccttacatgtggggaaagtcttctgtggctcctcatttctgagcagtccccgcagcgcaaacttggccagttatccttttggagattgagttcccccagctccgtttcctcctatcacaatcactgcatttccatgtagattctgctgtgtctaagaatacagtggctgagggctggccatccctgtgcccttctccatggcagccccagaatggtgctggtgactcccgatacacctggaatgctaggtttctgggttctgctcatatcactgccacctgtgagccttgagtgagccactggcagttccggagcttccttctccctggagtaatctgagatactcacactctctgcttctgggagcaagtatgagtattaattaccagcccaccccagaaccagtgaggaggtggctctaggagtgctccatgagagtgtgtgatgggataacacaccccctggaaagaccagaagggactcaggaatgaagtggctggccagagccccacaccttcagctaggtgggagatggctacacatcagccccttgggagccctggagacttagttggccctgcttggaggctgtgggagctggatccctccccgctgcatcccttccatttttctccgtctcagacagagcagccttgttctcttctccttagtcacagaccattgtctggcacggagttctaggggtgagaagtgtcccgggacttggatgccccgcaaaggcccaatctggcatgactcctaaattaataatgtatttagctgtgggaagagattcttgcaagccaagggcccagagaagatgtccctgtgaatgtgtcactgcacaacctggcaccaaaagggttaccaagaacagcagccatcttgctgcagaggatgctttgttcccagctgaggagttgaataaattcattctagggctggtagaattctcattgaaaagcctcctttgccactttagggggctttgtctgcacctcttcccccagttccacagaagatgccttcagtccttgaattttggctcaggagttctgactctgggggcagggaggaaggggccatttctttaggaaaggagtctcagcttgctcactgtggtcagatgaaatgtgatttatctcttggtttctggtacctcagacctctgagacctgaggtgtattttgtctttggagatgagtccacccctgccccctcttagtccgttttcttctctgtgcccactcccctccttctctcccggcccatccctaggggctcgggtgacattctaacttctcacgggtactcagcccctttccctctgttttctccacagcaagccccgcccaacacggactggcgtttctctcaggcccagagacccggcaccagcgggtaggtgactgattctccagcccaccctcttctctgcggcattttctcagggatgacgtgggaggagatgggggagggcccagcatttgctacagatggcttctccctcagtttgagatcccagggaggtcttggtgtgcggggggctggcacacagaccccggaaggaagaggcgactgccctgactgttcaggaagctcaattcacatgcttgccccttccctcctcgccacgaccggcaccttttcctatcccctgagggcactgtggaaccaaaggatggtcttaagctggtctctgggtgaaagcgaggctttctatgcccatgtactgcctaaccccctcccctgagttgagctgggctccattatgacctggggctcaggcagaaaagcatttgaccggaggaggcggtccgcactcagcgcctcctccagagcctccagagccgaggctgactgcagcctggggagagtggaggcagcacagctggaggtggaactgaggaaggactgggcggggcatggagcaggcccccttctccggcccctcctcccactgtcctctgcccctacttgtcctgctctctgtctgtggggtctccgtgtctctgcccctttttcttgagtttccgtctttgccactttctcttacctctcagtccttccctcagtctctatctcgctttgcaatctctgcctctccctctcttctccatctctgtcttagcttccgtcttgattgctgcacctcagcctcagtccctttcatttgtctacttgcattgatctgtgccgcccactgtgcctgccatggcataagtgctcaataaatgtggagtgagtaactacacgggacccttagtctctttctccttctctatctctgcctccctgtccttgtcctggacctcttttctgtttctcctttcaccgtttcctagcgccttgtgttcttctatccccagcctctatgtttctctgtctctcactatttctgctttcctctctgttctttgtctctctttgtctctgtctctgtatatctttctttgtctctgtctctggtctctgtgcctgttgtctttttctgcctctttctctgttactctttctttatctctctttttcttttatcttgtcttttttctctgagcctctgtctctgtctctcatttttttgtgcttgtgggcaagccagcacacacaaccccccacccaccacccaccaacaccccgctctcttccttccctgcccctcacacactgagcctttgatcgcagctctccaccagacaccctcccatccaagcagccccagctgctcatttcaatctggtatgaattcctgctgagacaggaaccccctgcgggctgaaggggagggaaacttcagcagaaagaccttcagttggtctgagcagagtgggataggctctgcgccaggcctcccagttagaagtcaggagcctggaggagtctcagagcccagggagagaagcaggagcttgggccaccttaccctacctcctcaatggttgagtacttgctgtccacatttgccaagttgctacagatgctgagcttccaagagttatctttcccccatcctgcaaccaaccaaacccttgttgccacaaggacccaggagcccttggtgtatggcagagattccagcttctgggcatgcacagtcctgtcacccattttaggaacgcaaagcgcttcttagaaggcccctaaaaagcagcagatcaaaaggcttgggctgcccttgcccttcctttgaccccagctgttgtccttctccctgctggccttgccaaccttctcataagttatccattaagtcattaatgtattcattcgttcatttattcaacaaatatttatcgagcatctactatgagcagggccctgtgctaaacattgggctataggagtgaacaagtagatgtgatcccagaactcataggcttccagaccagcagaggagactgaaaatttgcaacaagtaacacttaaaaaaaaaaaaaaaggctgggcactgtggttcacgcctgtaatcccagcactttgggaggccaaggtgggtagatcacttgaggtcaggggtttgagaccagcctggcagccaacatggtgaaaccccatctcgattaaaaatacaaaaattagccaggcgtggtggcaggcacctgtaatcccagcgacttaggaggctgaggcagaactgcttgaacccggaaggcagaggttgcagtgagctgagatcacgaaaaaaaaataatctagccacaaatcacagtaagttctgagaggcagagaacaatgtgagtgtaatgggggggggaagatcagagaaggcttctaggaggaggtgacattgagaagttctaggccatttatgttccctctacctaccaccaccccaggccatacactggctttgaagcagaattcaccattgaacctggaagccccaccaactgcctctcatgtgtcctctggggtgagcaccttacccctgcctcaactcccattccatcaaatgagaggcttagtggcctggaatacatgtgggagctcttggagatatggaggagaaggtgcggaacctctctctctctcctctctctgcttccttagttaacttgtggaggatgcaacaaaccttttttttttttttttttagacagagtcttgctctgttgcccaagctggagtgcagtggtgcgatcttggctcactgcaacctctgcctgccaggttcaagcgattctcctgcctcagcctcccgagtagctgggacagcaggtgtgcaccaccacacccagctcatttttgtatttttagtagagatgggtttcgccacgttggccaggctggtttcaaactccccgacctcaactgatccacctgcttcagcttcccaaagtgctagaattacaggtgtgatcgcccccggccacaacaaacatttttgattcagcggctccaaagtgaaataagcgttaggatctagtccagtaacttcaacttctctccttcattcattcaacaaatggtcagtgagcactttctgttggccaggcagtgttctcgatgtgggaggcccctgccctcaaggagtttacagtgcactgaaggagacaaatattgaccaaataattacaaaaataaatgtgagactgaaactgtcataagtgctaggtagaattgtatctggtggtgtgggcgtataatagggatttgatttagggagcaggaggacatcctggaaatgaagttgtgctgagatctgaaagacaaatacaaattaaccagctaaagaaaagaaggaagagcattccagatggtcaggcataccagcttcaaagcagggctggtgttgagttcttcagtaaacttggttcaagatcaagccagctctgggtcacactgcctacacagaaggaagagcattccaaatgggaaaagcctatgcaaaagccttgtggtgaggcctcctgggatcaagggaatggcagggagttttctctttgctggcactggagtgaggggatgaagaggagaggttccttttatccagtctaaccctggttccagccttctgttgatgccctgcctcactccctccccaccatcttgcccactgccctccagcctggtctggtcagacacaccagcttcaaagcagggctagtattgagttcttcagtaaacttggttcaagttcaagtcagcactgggtcacactgcctagacagaaggaagaagacctggccaggtgtggtggctcacgcctgtaatcccagcactttgggaggctgaggtgggtggatcacctgaggtcaggagtttgagaccagcctggccaacatgatgaaaccccatctctagtaaaaatacaaaatattagccaggtgtggtggtgcacacctgtagtcccagctactcaggaggctgaggcaggggaatcgcttgaacccaggaggcggaggttgcagtgagctgagatcacaccactgcactccagtctgggtgacagagcgagactccatcaggaaagaaagaaagaaaaagagagagagggagggagggagggaaggaaggaaggaaggaaggaaggaaggaaggaaggaaggaaggaaggaaggaagaaaagaaagaaaaagggagaaaaaatgaagaagacttacattctgaagttcctgcttggcacatgcttctcctccccaccactatcccttctcaggtcatcctttgggtgtctgatcccaatagctgttgtctcaagctctgagcccagcaaaccatttcccccttcttaggctgtaacccaggccctgccctgcagctgtccccagcctctgcacaaagagtctccatttggtccctagactgttctctgatggctccacactaccatccctcctctgagagacagtatccctgctctctctcagtttgggcagtcattcaacaaacaaatagcaacttaatttttttccacttataaaatagtacatgctcattatagaaacatgaaaaatagaaaaaaaattaaaaggaaaaccacccatcattttacaatctagggagaaccaccaccaactacagtttaatatgaaacatttcaaatatgtacaaaagtagagagaatggtgtcatgaacctgtatgataccactatccagcttcaactaatgccttatcttgtttcacctatatccctacccttatcctgtccttggattcttttgaagcaaatctcagacatcatataatttcatcttggtctccaccatctttaacagatgacttttttttttttttttttttttggagacagagtctcactctcttgcccaggctgtggcacaatctcagctcactgcagccttcgcctcccgggttcaagcaattctcatgcttcagcctcctaagtagctaggattacaggtgtgcaccaccacacacagctaatattttgtattttcagtacaaacagggtttcgccatgttggccaggctggtcttgaactcctggcctcaagtgatccaccctcctcggcctcccaaaatgttgggattacaggtgtgagccaccttgcccggccagatgattctttcataaggtccacattttatatttgagtgagtgtctcttaagtatcttaatgctcttttaatgtaaaagacttcccctccatcttccatttttgcaatttatttgttgaatccctgccttttcatatatatctttctaaacttttctttgtgtaatcaaagaacatgcatgagcttcatttttatttttatttatttatttatttatttatttatttatttatttattgatacgtagccttgctctgtcacccaggctggactgcagtggcgcaatctcggctcactgcaagctccgcctcccaggttcacgccatgctcctgcctcagcctccagaatagctgggactacaggcgcccactaccacgcccggctaattattttgtatttttagtagagacggggtttcaccgtgttagccaggatggtctcgatctcctgacctcgtgatccgcccgcctcggcctcccaaagtgctgggattacaggcgtgagccaccgcgcctggccgagcttcattttaaaaaaatctcattcacctaaataagttgttcacaaacttgtcacactttcatgtgacactttattcacatattaagaactgttattcccagtcatacggtacatttcctactagttttttaaaaatagcaactgaggccatactgtccaacagaattatagcttttttcttctttgcagtgtatcatgagaatttccccatgtctttcaaaattcttcccaagtcatttgcagagtaactcctcttatgaatatacatattattttacagaataagtcctcatatgaatatacatattatttttctaatgctaatgggcttttgctacattagaaaacatacacattcatttacaattttttttttttgagacagtctcgctctgtctccaggctggggtgcagtggcgccatctcggctcactgcaagctccacctcctgggttcaagcaattctcctgcctcagcctcctgagtagctgggactacaggcacgcgccaccacgcccagctaatttttgtatttttagtagagacggggtttcaccatgttgaccaggatggtctcaatctcttgacctcgtgatccgcctgcctcagcctccctaagtgctgggattacaggtgggagccaccatccccagcctcatttacattttaacacaattaaattcagggtgttgtcagggtgacttcctagatttctcagttttttgagcatgatgtagggagtattttattatagtccagtctatgggatattcccttatacacacacacacacacacacacacacacacacacacacacacaccccaaactcaatagggcaagaaccatattcatcatctcttaaatcctaggtcctgtcacaggccactgcttggaaaatagttgactaaatgtagtccatttcttccatttttacttttcactattccccaaatcctggaagagtccctcatatctgctgctggggctccaaggcctccaagctgaagcccagtacgttgttgtgcataagatcataggccctggaatcatattaggctggctttcaggttgcaactctaccagttccagctgtgtgactctggtatagtctctcaacctctctgagccctgttttcatctgttggaaaatatagataatcacaacacttatctgcagggtgattccgaggataaaaaagacaaatatattacccagtcagcttagaataggaagctctcagtaaatggttaaaaaagaggtctctctccctctgctcatctcttacccagcttcacataattggcagcccacccacctgtttggccctcaaccttcaaccatttcccaggacgcctccttacactcctgatcatcatggttccaaccccactgttccactcagctttgttccctcaacaccactgctccctgtgacaggtcatcctcctaacctctggcatctggtcccgttgtctccctgacaacccgcatgctctcctccctgcaacccccgccgcttgcctgctctccctactttattcccattagcccccttcacctggggctgagaacacctggccttgaccctgcaccctcagccaggcccacagagctcagtcgggccggaagtaaggaccccagatattcagttgaggaatttaacattaatacaataatatagaatccaccagcagattttcataaatgttctgtgtgttcttttatccttttttttaatccaggattttatcaaggagcatagattgcatttggttgtcacgtctttcctctcctttaatctggagccagctcccagtctttttatttttttaatgacatggatatttttaaagagtccaggccagttgtactttaaaatgtccccgaacctggatttgctggctattctctgatggttagattcagattacacaccttggtaggaatacttcccgcagcatcacactgggactcatctaacgtcggcctgtcccactatcagtgatgccgagtttgttcgtgtggtaaaaacagtgtcccagatctctccattataaaaatatatttttataaagatattttaaaatatttgtgaaaatataagtaatctgtggatgatactttgagataggcagcaacccttcatgcaattttagtattccctgatgatccttgcctgtatctgtttttacatcagtgattacaaagcggtgatgttctgtcattccttctacatgtatttgctggtattcttctgaaaattacctggatgatttcttcagatttaaattcactgtcttttccttggggaagcctggactggctgagctgcctaaccctgactctctgtcttttttttttttttgacagggagtctagctctgttgccaggctggagtgcagtggcaaccttcacctcctgggttcaagcgattctcctgcctcagcctcccaagtagctgggattacaggcgtgtgccaccatgcccggttaattttttttttttaatatctattttagttgagacagggtttcaccatgttggtcagaatggtctcgatctcctgacctcgtggtctgcccgcccctgcctctcttcataccctctggtagcccctgacacagcccatggcaagtatcacaattgcaattactctattgtgtaattatttaaaatcagcctctcagtgcccaccatgagcaccgtaaagatggacagtttctatcatactcacagccacaaccccagcacctggctctgtgtctggtacatagaaattgctcaagaaagaattgttggaggggcgcggtggctcacgcctgtaattccagcactttgggaagcggaggcaggtggatcatgaggtcaggagttcgaaaccaacctggccaatatggtgaaaccccatctctactaaaaatacaaaaattcgctgggcatggtggcatgtgtgcacttgtcgtcccagctgctcaagaggctgaggcaggagaatcacttgaacctgggaggcagaggttgcagtgagccgagatcgcgccactgtactccagcctgggtgacagagcgagactccagctcaaaaaaaaaaaaaaaagaaaaaagaaaagaaataattattgaatcaatggaaacagaattacaactcttcccacttttgggaaggagaattgagattcctgctttccccttcaaccctagctttatgtttgttgtgatggtatagaggtcacacatggcagccttgtgtctgttcttaggctgagttcatctacttagggacggggaatcccagattgggcaaaaccaaaagcagggacagaccttggaaaaattgtaaagcagttcttggttgtgctcacccaccatgacaaaatatgcacacacacaacgcaacacacacacagacattttcatgccttcaaggcctaccctacagcctttcccatggtgccaaacccttcttcttaccttacagtcacttaactgtctctgctggtctcttcccactcatttaggcaacaaatatttattgaaaaacttctctgagccagatggtgccaaacagttacctaaagggcagactgtgtgtgtgccagggctgtttcccgccaacactcccctgcaaattgaaataatttcatccttggaaattcaaaaaaatcatgaaaattgtcactgtgggaaaattccaagtagagctgaaccttctaagaagcagagagttcttcttatggtttagtatttttttaaattatgaatcatttcatgttttttcaacactcggagtttctaaaagtctcacttaggtccaagtgctaggctttgtgctaggtgcttcagtaggaagcaggtggagtcgctgcctcacagaagccagtgtggtggaggaacagacaggcactacaacagctgcagtgtgactagtgccatgtggggcagccgctgggatgggagtacagtggaggcacctgcccagtctgagtggatctcctctgatatattttattcgtgtcatcatggcaaatgttgggggactggcattctagggaacaccatctgcccaggattcacagcaagagggaacttgagggataggaaagtgcaccttggaaaaggtttgatgatagagtgtttgagggcggggggtgggggttcttgtaaaataggaggggcaggttcttctatggccgtggattttactctgagggcttaggaagccattgaattttagaaatttcttctccctgctccagggtctcttggggcctcctacatctccccctaggtacctcctaggtccccactttttctctagctctggaacattctcttccatttcccaccttcacagtcctctggagaaggtctgatctccctcactatgacaggaagccaggctctctcatggtgggtgggggaatgcactatgttcaatgcattggaccagcctggccaacatggtgaaaccccgtctgtactaaaaatacaaaaattagcctggcacagtggcaggtgcctgtcatcccagctacttgggagactgaggcaggagaatcgcttgaacccaggaggtggatgttgcaatgagccaagatcgcgccactgcactccagcctggatgacagagtaagaccctgtctaaaacaaaaagaaaaaagcatcggaggcagcaaagagctggtttgagggactgacttgtgggattctggcttctgaaggattgtagaagtgcctcctaccttgctgagagaaacaggtcttgggcatggggtagggttagggtactaggtttgggagccctgggagaggacaggaggggcatgagctgtgccggcctgggagtctgtgctcaccatcctactctctccccagctcccaaaatggcgatgacaccggcacctggcccaacaaccagtttgacacagagatgctgcaagccatgatcttggcgtccgccagtggtaagtggtgtcagtgtgtgtatggaagagtgggagacctggggttctggggtgcatctcacagccaccatgcccacggactggatgtcaaacctgtgtagtttctccagatctttcggcaggtctgaaaggacccacaattccaaacataaagcctggaattgtggctaaggaacagcagaggggttgggggtcctgggatgcctggaggagagcgaacaaggaaaagactcatggagggaatagtggttacaagtctagctctggaatgggacagtgtagctcaggtcctagctctgctactatccttgggacttggatcgacttgctcaatctctctaaacctcagtttcctcagcctagaaagtggggacagggaccccaaagggttgttgtagagattaaatgagatgataccacaaagcatagagttctgggcctggcgcttggaagccctcaagcaatgaaagtgggtgtagaaatccccagccgagagaacacctcctctttatgcgaggctcctcttttgctgcccctaactccagagtaggattctggttttcccataaggttgactaagggcttcctttgtaatagagattcggctagtggtggttgtccctgaagagtcactagggcccagagcaggagaagaagaatatcatttgtccttaagagcacagcctaagctgggcgtggtggctcacgcctgtaatcccagcactttgggaagctgaggcaggaggatcatgaggtcaggagttcgaaaccggcctggccaacatagtgaaaccctgtctctactaaaaatacaaaaattagctgggcatggtggtgcgtgcctgtagtcccagctacttgggaggctgaggcaggagaatcgcttgaacctgggaggtggctgtggtgagcagaaaatcgcaccactgcactccagcctgggcaacagtctcgctctgtctcaaaaaaaaaaaaaaaaaaaaagagcacaggctttagaggcaggccaatctggattcaaatcctggcacctggcaccaccacttagcaatgagtccttaggtaagttattaaaccccctcggtttcacttactattaatgggcacagtattaacggatctcattgtggtgttaccagggccaaatgcaagtccctcagcacaggattggcagagagtaagggcacaatatattattatctttgctgacccaaacccgttttttactgggtagaaagcagaattagaataatgcctattaataaagactagcttctggagcagcaaatcctgggcttataaggaggctggcagaggatcaaggcattgccctatatcatgaactgatagccctgccctccagcatgtctggaggactggtgggtagagaaccaggtgaaatcacaagaagcactgtcatcacacctgggcacatactaaacaaactttaggggcctcctgtcaatgaatcctctcaatagctctgcaaggcaggtctgatttctcacactcgacagatgagagaaccgagaaggcacttgccccagggtcctcagttttgagctgccaagctgaggttctaacctggctcaactcctaagtttatgctctttctactatagggaccatggctgcctttggatccagcctcggcttctctattacctgagcaggatgagaggctgtcctcttcctcgagctctgctttattcttccagatcagggttgccagataaaatacaggatgcccagttacagttgaatgtcagataaacagcaagtactatttcagcataagtcagtctcaaatgttgcatgagacataatgtactaaaaaaaaaaatgctcattgtttacctgaaattcaaatttaactgggagccctgtacttttatttactaaatctggcaactctaccccagatgtctgtgaggttaagtggggccaggcctacagctgacggaaggacagagagagaggtggcagggactgctggcctcctgaggcagagctgtcccaggtctggtggggctatgattccagagaggccagagactgagtatgaaagtggcaggcggctgggtctgaggagatgccaagttggcctcttgagggaaataaacaggtatatttagctgttgtggccttgcgccctgaggccaggaagcagctttttagcctaaatccagatgttaaaaacagaaatgaaatcagtatttatggccccaaaccctccaagcaagtcatgcagctcgttcccctgtcaaggcctcccacctttggcccacacagggcctgaccctcgtctaagcctgcgccctggggaacggaccctgggggtggaggtggtgggtcaggccctgctctcactttcacacccgcttcctagccctgaaaccagagaggttcctgaagtccagcccagccaggcctgtggggctgctgagaggggttaagtaagagggagagtaaaaaccgacacttgggaggaggcttttaaaataaacatctgcggggagggatgctctcaaggaggctgcggtttgcagctcagccagctgtgttccagctaatcagcctccttgggctactctggagttgctgccttggccctgggatggggtaggttaagaggacagagggaggtcagggagctgggggctgagtttccctgagtagaggctggcacaggagagaaggcatcacccccacctcgtccaggccagaagatgtccagcttcttgaggctctcctaagtctgcctctcctgggaccaagagaaaatcccggtccttgaccaaggtgggccttggggggagtggggtgtagagggaggggcactggagaactgactctacagaaagtcaaagctggcaatccaacttcttcccctcagatttatagatgggaaaacaggcttgagccacgcagagacttgaccaagctcacacagttccttagtggcagagcagagcaaatattctctttcttttacattctggatttccatatcttctctccctcctggtccagcccaacctcagggcaccccccacgaggtgggcgggggatggctttgtcacttgcacccactcggggtgctactcagagatcttgggtgcacataggacgtgggtgggccgagcttctagctactccgtcaggcccttcctgtcattctgtctctgcctcccttctccctgcttctccgtgttcctcctcattcttttctgtgtgcagggagactacaccccccaccccgctctttctctggcgcctctgaggtcccccctctagcccctaaatcactctggaatcctggctctttgaagccagatctgggcccccctcccctaccccttccattcccaggctgggaaaggctgaagaggctgacggctggaggggagggggcggggcggtggcggatctggcttccttttggagttaattagggaaaacagagaaatgtcagcggaatgaaagggctgggggtgggggccagctggggtaggagaggaggaagtgggcagctgctccctcccactcaacccctctcccccgcccccagaaagctctcagctccggggatttgcgacatgaaatgggggctgtagaaacctgagcgctggtgcgtgaagagaaaaaccgaggcgcatcccggctctcccctcccgtgtgccctcctcctcttatgccggcttgaaaatatttcctgtctctctatttctcaatccctggttgatgtcccaggattactcagcctctccggctttagtcactctcgctacccgctcccagggtccagggtggaggcagagggaggctgggagagaagctctactgccagctgggcctgggctggcctgggcatccctgaggttttaactgtctcctaaccacagaggatctcagggcctccagcagcgagccccaatgagtcaaactcttgtttcctcctctcccacccccgacccagtcagggcaggtgaggggtagaggtgatggcatgctggatgtgacggtgttgatgatgtattgcacaggatgaagcaccatctcatttagtcctcacagcagccttcacagtgcgtacaaatcagctggcaattccgagaggctgcattctaaacaagttcctgggtgatgctgagccagggccagagtgtggacttctctgggccccagtttcttcttctgtacagtgggacgttggactggaggtgctgtctgatgtcacctagctgtggcactctgagcctgtgcctaaagtgtccctgagatgtctagtccccgagatcatcatctcctcagcttcatagagccgagctcttctccatcttctctctacctcccattcactcagaacagggataaggtccaagctgctggtggtgatggtgactgactgtcccttccagcatgcgcttaggtacacttgggcctgaatgcccctctaacaaatgctaccgggtatggccttggtccttctaacacttggttccctcatctgtaaaatgagggtcataccacatagctggctgggctgttatgtagaggttaaaagtgattgtgcatgtgaagcatccagcagagtgcctggcacacagtaggtgctcaaatgctgttttgaaatacaaaaattagctgggctagtggtgtgcacctgtaatctcagctactcaggaggttgaggcaggagaatcacttgagcccaggaggcagaggttgcagtgagccgggatcgcgccactgcactccaggctgggcgacagagcaggactccatcttaaaaaaaaaaaaaaaaaaatgctgttttgaaatggaggcttggaagagcactcttcacccccaccccacacacttactaacggaactaccgaatctctactcgtgccaggccttgcttggcaaaggctaggggcatgtaaagccatggtttcatggctgctgccctccaggagcccatggtctagtgtgggagtcagaggctcccttgagaaagccagggcaaggaactgagagcccgtgtcacagccctgagagaaataccagcgaatgtgttttgagcacttacatctaccaggcactattttacgtacctgacatacattttcttatttagcattcactaaaaccagaagaggtggttaccattatcatccccattttgcagatgagaaaactgaagtggcataaggaggttaggtagacttgcccaggatcacagtgagtaaggaaaggagctaggaatcaaacctagactttctcactccagagcctcttaacctctaccctcaactcttgtgaagagagactaccttggtgacccctatattcccagtgctcagcgtggtcaaggcccagggtgctgtataggcattcattaactgctggggatataagacagtgactgttgaggaccctaagtttagctcccacctgatcttcctctgtctctgcagaagctgctgatgggagctccaccctgggagggggtgccggcaccatgggattgagcgcccgctacggaccccagttcaccctgcagcacgtgcccgactaccgccagaatgtctacatcccaggcagcaatgccacactgaccaacgcagctggcaagcgggatggcaaggccccagcaggtggcaatggcaacaagaagaagtcgggcaagaaggagaagaagtaacatggaggccaggccaagagccacagggcggcctctccccaaccagcccagcttctccttacctgcacccaggcctcagagtttcagggctaacccccagaatactggtaggggccaaggccatgctccccttgggaaacagaaacaagtgcccagtcagcacctaccccttcccccccagggggttgaatatgcaaaagcagttccgctgggaacccccatccaatcaactgctgtacccatgggggtagtggggttactgtagacaccaagaaccatttgccacaccccgtttagttacagctgaactcctccatcttccaaatcaatcaggcccatccatcccatgcctccctcctccccaccccactccaacagttcctctttcccgagtaaggtggttggggtgttgaagtaccaagtaacctacaagcctcctagttctgaaaagttggaagggcatcatgacctcttggcctctcctttgattctcaatcttcccccaaagcatggtttggtgccagccccttcacctccttccagagcccaagatcaatgctcaagttttggaggacatgatcaccatccccatggtactgatgcttgctggatttagggagggcattttgctaccaagcctcttcccaacgccctggggaccagtcttctgttttgtttttcattgtttgacgtttccactgcatgccttgacttcccccacctcctcctcaaacaagagactccactgcatgttccaagacagtatggggtggtaagataaggaagggaagtgtgtggatgtggatggtgggggcatggacaaagcttgacacatcaagttatcaaggccttggaggaggctctgtatgtcctcaggggactgacaacatcctccagattccagccataaaccaataactaggctggacccttcccactacataatagggctcagcccaggcagccagctttgggctgagctaacaggaccaatggattaaactggcatttcagtccaaggaagctcgaagcaggtttaggaccaggtccccttgagaggtcagaggggcctctgtgggtgctgggtactccagaggtgccactggtggaagggtcagcggagccccagcaggaagggtgggccagccaggccattcttagtccctgggttggggaggcagggagctagggcagggaccaaatgaacagaaagtctcagcccaggatggggcttcttcaacagggcccctgccctcctgaagcctcagtccttcaccttgccaggtgccgtttctcttccgtgaaggccactgcccaggtccccagtgcgccccctagtggccatagcctggttaaagttccccagtgcctccttgtgcatagaccttcttctcccacccccttctgcccctgggtccccggccatccagcggggctgccagagaaccccagacctgcccttacagtagtgtagcgccccctccctctttcggctggtgtagaatagccagtagtgtagtgcggtgtgcttttacgtgatggcgggtgggcagcgggcggcgggctccgcgcagccgtctgtccttgatctgcccgcggcggcccgtgttgtgttttgtgctgtgtccacgcgctaaggcgaccccctcccccgtactgacttctcctataagcgcttctcttcgcatagtcacgtagctcccaccccaccctcttcctgtgtctcacgcaagttttatactctaatatttatatggctttttttcttcgacaaaaaaataataaaacgtttcttctgaaaagctgaacgtttctgtataagcgatggaagctcctggcatgtgtgcatgaagtgatgagctgaggtgggtgctggaagaagggcggaatcgggaggccactttgtgtcattgcgcgtctagatgtttccgaattgcgtgtgtgtgtgtgactgtgcaatatggttgtgtatgcttgcaatgccgttgtgcctatgagacagtgtgcgattgtgtgcctatggatctgtgtaccgtgtgccattgtgtgatcggtccgctgtgggggtggggatctgagtgcggcgtgtcagtgtgcagtggagtgtgcagtctaagcttgcggctgtctccaggcagaagaggagaccccggcgcgggcgggggcgggttggcgccgggcaaacgccttgggtagaggggagaggacgtttcgttagttcccgccccttcctgactaaaattgcctacccgaagcgccccggagggcttcacgggaggagggtagactctcctttgcccccgcacccccacccccgctgcctaggggttttgggaaagccgcgggagtgggagggaatgcgggaggtgattcttccaaagccaagtctgcagctcgagcctcagtttccccatctggaattcgccttcccgctgacatctccgtagcgaagcctaagaaattggagggctcatcctcttcttgcgggggtcaaggggactgaaaggacgtgcaggaaatgagatccatcgcagactcagctcccctccctccttcctgtcggtgcttttccactcactcgcctgctctcccatctccccgccccctccgcctgcctcctcgaagcactgtgggattccgaggttgctgcagccagagaagctgcagaaaaacacggagctgggggtgaagggggacttaaaaggggaactacccggaaggacccaagaacacaaagacagagccactgcggttatctggctggtcagcaagggtatgcggcttcctccgcgctgcggaggctcccagagccaggtcacccattctgccagctcaagtctgttgtcatgggaaccaaaccttccaacttaagaatctgggggcgactttctagcgtgggaggaagggtggtgtgcacggttgctgagatggaagcagggttttgttactcagagccaggctgcggaggggcggggtgccgggcgcctgggttctattccaggcacagcagcagactggcagagcgcgtgagcagctgtggtttgtcccctaattggtatgtgtgcctataaagctctgaaccagaaaggcgtggcctccggggggacgggagggaggcggcaggcaacccatccccacacctcaggccatactgaggaggcagctgcccaggctccagggctatttaaaaggcttttatttccagttccagagcccgcccgaatgggtttgtggtcctctccaggcctctccctgtctatcctgggcctgctcattgctggtctggcttttttgtgcaggtcataacg

SEQ ID NO: 441 - DNA, 95011 bp, Homo sapiens
  source 1..95011: mol_type = genomic DNA
ggctcgcccgcgctcagcgccaatgtgagcctgcgcgtgttggtgggcgaccgtaacgacaacgcaccgcgggtgctgtaccctgcgctgggtcccgacggctccgcgctcttcgacacagtgccgcgggccgcgcagccaggctacctggtgaccaaggtggtggccgtggacgcggactcggggcacaatgcctggctgtcctaccacgtggtgcaggccagtgagcccgggctcttcagcctggggctgcgaacaggcgaggtgcgcatggtgcgtgctttgggtgacaaggactcggtccgccagcgcctgctagtcgctgtaagagatggaggacagccacccctttcagccactgccacgctgcacctggtgttcgcagatagcttgcaagaggtactgccggatttcagcgaccatcccacaccctctgactcccaggctgagatgcagttttacctggtggtggccttggccttgatttctgtgctctttctcctcgcggtgattctagctattgctctacgcctgcgacagtctttcagccctactgcaggagactgctttgagtcagttctctgctccaagtccggacctgtgggtccccccaactacagtgagggaacgttgccctatgcctataatttttgtgtgcctggggatcaaatgaatccagaatttaattttttcacatctgttgatcattgtccagccacacaagataacctcaacaaagatagcatgctactggctagcattttaactcccagcgttgaagcagataagaagattcttaaacaggtaagtatttaaaaatgtatttaatcctttttatattacaatatgccaatatattccaatatagtggtattattttaagattctagataacttcttcatagagttcgcaaaatataggtcaaatttatggttatcattattaaaacaaaagtttaaattaaatgcctcagtcttcctactattcaaagacattttaaagcaaactacatgggtaatctccggtgacatttttatgaagtaaaatacctttcggttaaaaatataaaatacaggtatatttttacggcatggtattttaattgaaaccctgatgctactcaatttttctcaagtatttcatcttcatttactcaataaaggaaccttgtaagaattatagttaggcatcctacctgatgattttatcgggaccgtattatttccacttccagaaatgtcgttcctttcagtcggttaaaatcaattggaaccaactacaacctacaagttttcagctccagtaatattttgaaaactttttaaaaattaagcaagcccttttaataattactcctttcgcaggtgttcttggtaaagttttaacgtcacataatgtaagtattgtgtatcatcgtttttaagctctacaaatacgtgtgattcacaaaggtgagcgtaatcatttcttctggaatttcttagtcgttgcaataataagaatgggctctaggcgccgctgctcaccaatcagggaatgggaagctgcgcgccattgagtccctccctcccccgcctctaccacacaaagcggaatgagatggatactcacagatcctgacactggagacttagaagtattttccttcgctttctgatatattttggatgtagtcggcctaggacttcatagatacataagccgattcacaaccaaccagctcgagaaaccgcggaatatcggcttagagcctgccatggcgaatcggctacagcgcggggaccgcagtcggctgctgctgctgctgtgcattttcctggggacgctgcgggggttccgggccaggcagatccgatattcggtgccagaagagaccgaaaagggctccttcgtgggcaatatctccaaggacctggggctggagccccgggagctggcgaagcgcggagtccgcatcgtctccagagggaagacacagcttttcgctgtgaatccgcgaagcggcagcttgatcacggcaggcaggatagaccgggaggagctctgtgagacggtgtcctcctgttttttaaatatggaacttctcgtggaagacaccttgaagatttacggagtggaggtggaaataatagatattaatgataacgcccccagcttccaggaggacgaagtggagataaaagtcagtgagcacgcaattcctggggcgcgatttgctcttcctaatgctagggatccagatgtgggcgtgaactccctccagagctaccagctcagccctaataattacttttccttgcaactgcggggcagaacggatggggccaagaatccagagctagtactggagggaagcctggaccgagagaaagaggctgctcacctgctcctcctcacagctttagatggaggcgatcccatccgaaagggcgcagttcccattcgtgtggtggtcctcgatgtaaatgatcacatcccaatgtttacacagtccgtatatcgcgtgagtgttccagaaaacatcagctccggaactcgggtgctgatggttaatgcaacggatccagacgagggaatcaacggggaagtaatgtattcatttcggaacatggaaagcaaggcttctgaaatattccaattggattcacaaactggagaagttcaagtacgggggtctctggattttgaaaaatatagattctatgagatggaaattcaaggccaagatggtggaggtctctttaccaccacgacgatgttgatcactgttgtggatgtgaatgataacgctccagaaataactatcacctcttctattaattcaattctggaaaactctcctccaggtacagtgattgctcttctaaatgtgcaagatcaagattctggagaaaatggtcaagtctcctgttttattcctaaccacctgccttttaaattagaaaagacttatggaaattattacaaattgataacaagcagagtgctggacagggagttggtccagagctacaatataacgttgacagccacagaccagggaagcccgcctttgtctgcagaaactcatgtctggctgaatgtggcagatgacaacgataaccctcccgtttttcctcactcctcttactctgcctacattcccgaaaacaaccccaggggtgcctccatcttctcagtgaccgccctcgacccggacagcaaacagaatgccctggtcacttactctctgacggatgacactgtccagggggtgcctctgtcctcctatgtctctattaactccaacactggtgttctctatgccctacaatccttcgactatgagcagtttcgagacttagaactgagagtgatagcacgtgacagcggggacccgcccctcagcagcaacgtgtcgctgagcctgttcgtgctggaccagaacgacaatgcgcccgagatcctgtaccctgccctccccacagacggctccactggcgtggagctggcgccccgctctgcggaacctggctacctggtgaccaaggtggttgcggtggacaaagattcaggccagaacgcctggctgtcctatcgcctgcttaaggccagcgagccgggactcttcgcggtgggggagcacacgggcgaggtgcgtacagcgcgggcactgctggacagagacgcgctcaagcagagcctcgtggtggccgtccaggaccacggccagccccctctctcggccaccgtcacgctcaccgtggctgtggccgacagcatccccgaagtcctggcggacctcggcagcctcgagtctctggctaactctgaaacctcagacctctcgctgtacttggtggtggcggtggccgcagtctcctgcatcttcctggtctttgtcatcgtgctgctggcactcaggctgtggcgctggcataagtcacgcctgctgcaggcttctgaaggcgggttggcaggtatgcccacgtcacattttgtaggcgtggacggggtacaggctttcctgcaaacctattcccacgaggtctctctcattgcggactcgcagaagagtcacctgattttcccccagcccaactatggggacacgctcatcagccaggagagctgtgagaaaagcgagccactcttgatagctgaagactcagctatcattttaggcaaatgtgacccgacaagtaatcaggtgagatttatttctctgcctcctaattgttggtgtcttggcacaagtcttttaaggagatgttttttgagcctgttatgaaaactgtttggggggggggtggggcggcatatatttagttcatatatatttagagcaatacatgtgagttttactttgcctttcatgagattacgataatctttcagaacgtttttgtgaaagtcatttttcaatcttggcatattttcttttgatttcaaaggggccattcaactatgctggtttggtttgaagtaagttgaattttagtattatttttctattatcagtgtatgaggctctcaatttattatatatagatacaaattaatgattcacaaacactttttatttccatttcaattttgctgtgccttcactgatttgtagttatattccaccattatttgctattactgctaatgttcaaattttgatcctgttgatttaatagcatgctccctctagctctccttctcatctatctatctatacacatgcacacacacttatacacgtaagcttttctctgagcaattttattttgattcttggtggctggtaatatgcttagatcctgttgactatttcaactttgtctcatttcttcatcctatcaacacagacatattgactggcttttaactactggatttccttgggagataaaatttagatcacattttttcttaagctctagatgtcttttccattactatggtgaagttacattgactgttctgaggaaataattgaattattgaactggtattatttccttttattcttttactttggtgtctgtgtttgtatgtatggaaggttttttaatgtagtaaatccatatatagaaataacttgattttgattcagtgcttctcaaaaacctattttcaaatgtgctaaagatgtctacagatttattcaaatagagtagtttgtgaatatataaatagattgaaggtatttggactttaattaaactgatttagctagtatccttctggctatttttttgttcattttcagtgtagttgggagtcatagattccttctttctttctttataaggtcattcttatggcaaatagtacattcagttcttttattcagaccaacttgttattgaagcttgatagttgcctgacatacatgttatctgaagcaatgtctaggaaagccaaatgaggaaaggagacttatctagggtttttgatcacaggaatcatttccataatcaattcagtcaacactctcacatcacttctaggtatttgccccaaattacttggatatttatgttccctttcaagtttagttttctcatttaggaatttaccttatgtcattagttgtaaactgactatctagggctcggacaaaaataatttcaactgtaggaaaggcaagtcttccaacagatgcctacatttttcttgaagtcaagaaaaatgttcaggtattttgagcatctagggataggatttatacttgtggaattccaaactgagaaaaatgatgtaaggcattgtactttgactggaattagttaaataaaaaggatatgaggtatttggctgggaaaaggagattgttccatattataaaacctcatctaaactaacttcccaagatcgtggagaacaaaaaggaagggttggctttgaaatgtgatattaagagggttatgttgattcggaggtagtgataaagttctgttaaggtataacatatagtcccattaaatagaggataaaaataaaacaccatcacatttcatgttattaattcctatggcaacctactaggctatacctttatattctctttatgatgaaacatgaaacaataatccttttcagaaacctcttttataagtgataagaagggtttggctaactttattctgaatatgccctatatagctttcagtgctcctccagttttctctgataaaactaggaggaaaattatctgcacatcagattgaaaataatactgcatatcatttcatagtggtcaaaattttcccataccacttgatggggatgttttcccacaaggtttttgttctacaacaggagagaagactttgcctagttcttccaatatgtgcattgcttctgcttagaaaaaaacaaacttttaaattctctttgctgggttaatgactgttctatagattcccatctctaaggaatcttctttggtagtaaacactggaaaacagtcactacgaaaactcataaaatgtctagtttcctatacattagtccaacacatcagtctaattctgaatcccattgaattagcaaaggcttccggctgcagttttctaaatagactcagagccctgctgttggccaatgtgctgcaagaactggagcctgggatctaccaggacgatattctgttcagtcacagaagcaagtcggagagtggccaagacttgggctttctgctcctgcaaatctgattccatacggattggggtgccctcaaactgggagcattgagttttctatgtatggaagtaaatattttaaaagcactttgtgaaacattttctcttaacgtcggagactgcagcaacgcatgggaaggatgggaaacagggtgaagcagagaagcaggacccggcagtggcaagcactcttccctttcctgctgcctttgttctgcggggcaccctcggagcagatccgctactctattccagaagaaacggtccagggctccgtggtggggaaccttgcggaggacatgcggctgcatgttcaggatttattgacctgaaaccttagagttagtgcagagaaacaatactttaccgtgaacacggagaatgggaacatacttgtgagtgacagaatagatcgagagtcactgtcttcaaaatcctctgtgtcatacccttagagattgtagcagagaatcctctaaatgtttttcacataaatgtgatgatagaagatataaatgataacccacctcattttccccaaaatagcattgttttacaaatcaatgaactagcaattccaggcattcggtttggcctggaatctgctatagatgcagatgtagggcctcactctctccagagttaccagctcagttctaatgaacatttctctctgatgatggacaagactaaaggcaagaacgctccagaattagtgctggagaagcccctgggccaggagcaacagagctctcatctcctggtcctggaagcaatggacatgggtgacccagtcccaactggcactgctgcaattcaaattgaggtcactgatgccaacgataatgccccagtttttagccaggatgtatacaaagtcagccttagagagaatgtgcccccaggcacctctgtactaaaggtgacagccactgaccaggatgagggtgtcaatgcggagatcacctactctttcaaatccctacgagatgatattggaaatatgtttgtgctagaccatcaaaatggggaaattaaatccaaagacttaatagacttcgaatttcgtagcagttataccatgagagtagaagctaaggatggtggaggcatgaccagcgaatgtaaaattatactagaaatcctagatgagaatgacaatgccccagacgtggtttttacttcagtgtccagttctgtaactgaggacgcagaaccctggacggtgatcactctgttcaaaacacatgataaagattcgagagaaaatggggaggttacatgcctcataaacgaaagagttccttttagaatcgaatcttccgccaataatgactataagcttgtaacagatgggaccctggattgggagcggatcccggagtacaacgtcaccatcactgccactgacaagggcaagcctccgctctcatccagcacaagcctcaccctacgcattggtgaagtcaacgacaatgctccggttttccaccaagtctcctacgtggtccacgtggccgaaaacaaccttcccggagcctccatcccacaagtcagcgcctctgacctggacctagggctgaatggccaagtctcctactccatcgttaccactgacttggagctgcgggcactgtcgtcctacgtgtccgtgagcgcacagagcggggtggtggtcgcgcagcgtgccttcgaccacgagcagctgtgcgccttcgagctcacgatgcaggcccacgaccagggctcgcccgcgctcagcgccaacatgagccggcgcatgttggtgggcgacctcaatgacaatgtgccgcgggtgctgtaccccgcgctggggcccgatggctccgcactcttcgatatagtgccacgcgccgcagagtccggctacctggtgaccaaggtggtggcggtggacgcagattcgggacacaacgcttggctgtcctaccacgtgctgcaggccatcgagcccgggcttttcagcctggggctgcacacgggaacctgctggttgctgtgcgtgacggaggacagccgccgctctctgcgccgctacgcttcacctagtcttcgcagacagcctgcaggaggcactgccagacttcagtgacagtcctgtgccctctgattcccaagcaaagctgcagatttacctggtcgtggccttggccttgatttctatgctcttcttcctcgcagtgattttggcggtcgccttgcacctgcgatgctcttccagcccctctgcctggggttgctttcaccctggtctctgttctaagactagaccaggggtttttcccaactacaatgagggaactttgctttattcctgcaatctgtatgttccctcggattctagaaaaagaagatttaattttctcaccatgacaccagaaacagtccccccacaagatctttctaatgaagtttctctggtagcaagcttcactgaagagaataacaagataagctctaactctgttgctcctactcacgtgagttccaatgaatgtctttcatttacaaatggatgaggtttaattttcaaaccaatattttggcaagaaaatcttaaacatattatatctactattgcttcaggtttgtttgcccactcttaatatttcctgttcctttctgtgtgggccagtaacttcattattagctttcatgtatttttgaaacattttcaccatttttacgggagactttttttttttttggacggagtctcgctctgtggtccaggctggagtgcagtggcatgatctcggctcactgcaagctctgccttccgggttctggccattctcccgcctcagcctcccgggtagctgggactacaggcgcccgccaccacgcccggctaattttttgcatttttagtacagacggggtttcaccgtgttagccaggatggtctcgatttcctgacctcgtgatctgcccgcctcggcctcccaaagtgctgggattataggcgtgagccactgcacccggcccggagacattgtttatacacacacacacacacacacacacacacacacacacgtgtgaaaagtgggtattatgatactgctgtcattgagatattttaattgaggaataaatttttttcctgtgatgtttcttgggacatcaatatttgagtatataaggctttttctttaatccattaactataaattttgaagaaaatgcatgagaaaatggagaaaatgtgttttttttttaaaaaaaattgagattaaggtctcattatgttgcccaggctggactcaaactcttgggctacagtaatcctcccacctcaatctccagagtagctgagactacagttgcctgaaactgtgcctggcagagaaaaaagcttaaaaaaataagaacatggtaatgatttgataatattcagttacatttacttttgattcttgtaattcaagtaaactcaattttatgtctgatattttctcacagctacctatatatttcttcccaatttaaaatatattattttattttatgcctagcaaatatctttacagtataaatatttacgctcatgaaagtacgtagccagttatttcttagggagaattttttccctatattttgatgggcttccaaaagtattaccagtaattctcagtaattacaattaggtcagttacccaggaaaaggtaagtctgtaacattctttggactaccaattttcttttactaagtttcctgaacaataaatatttttgaaatataatgtattaatagaattctggagtacttccattatttccagtcaatgcaagttggaatgcttctactttatgctaaaaatattaatgtttctttttcacttgggttcttgttaagtgtgattctgataatgtatacaatcacatatcatttttaggtttccataatatcatgaaaatttgatttttaagcgttacatgtcaacaacctggtaaagtaatccttccattcaggatcattcaaggaatctatttaaaaatattttccccaaattatagctgaatcagaaagtttaaattattatattatatgatttgtcaaaaagagaaactcctagggagacatctccataataggtgtgttgggggaacagtaatctcaaagcagatgcactaacattataagattaaaatcattgtttatagaaacttccaattcatttaaaagctcattggggaaaaaaaagctcattgggaaaaaaaaaaaaagctcactaaagtttctattaaagcgaatacggtagatttccatccccttttgaagaacagtaggtggagctatttaagatataaaaacgaaatatcctttctgggagttcaagattgtgcagtaattggttaggactctgagcgccgctgttcaccaatcggggagagaaaagcggagatcctgctcgccttgcacgcgcctgaagcacaaagcagatagctaggaatgaaccatccctgggagtatgtggaaacaacggaggagctctgacttcccaactgtcccattctatgggcgaaggaactgctcctgacttcagtggttaagggcagaattgaaaataattctggaggaagataagaatgattcctgcgcgactgcaccgggactacaaagggcttgtcctgctgggaatcctcctggggactctgtgggagaccggatgcacccagatacgctattcagttccggaagagctggagaaaggctctagggtgggcgacatctccagggacctggggctggagccccgggagctcgcggagcgcggagtccgcatcatccccagaggtaggacgcagcttttcgccctgaatccgcgcagcggcagcttggtcacggcgggcaggatagaccgggaggagctctgtatgggggccatcaagtgtcaattaaatctagacattctgatggaggataaagtgaaaatatatggagtagaagtagaagtaagggacattaacgacaatgcgccttactttcgtgaaagtgaattagaaataaaaattagtgaaaatgcagccactgagatgcggttccctctaccccacgcctgggatccggatatcgggaagaactctctgcagagctacgagctcagcccgaacactcacttctccctcatcgtgcaaaatggagccgacggtagtaagtaccccgaattggtgctgaaacgcgccctggaccgcgaagaaaaggctgctcaccacctggtccttacggcctccgacgggggcgacccggtgcgcacaggcaccgcgcgcatccgcgtgatggttctggatgcgaacgacaacgcaccagcgtttgctcagcccgagtaccgcgcgagcgttccggagaatctggccttgggcacgcagctgcttgtagtcaacgctaccgaccctgacgaaggagtcaatgcggaagtgaggtattccttccggtatgtggacgacaaggcggcccaagttttcaaactagattgtaattcagggacaatatcaacaataggggagttggaccacgaggagtcaggattctaccagatggaagtgcaagcaatggataatgcaggatattctgcgcgagccaaagtcctgatcactgttctggacgtgaacgacaatgccccagaagtggtcctcacctctctcgccagctcggttcccgaaaactctcccagagggacattaattgcccttttaaatgtaaatgaccaagattctgaggaaaacggacaggtgatctgtttcatccaaggaaatctgccctttaaattagaaaaatcttacggaaattactatagtttagtcacagacatagtcttggatagggaacaggttcctagctacaacatcacagtgaccgccactgaccggggaaccccgcccctatccacggaaactcatatctcgctgaacgtggcagacaccaacgacaacccgccggtcttccctcaggcctcctattccgcttatatcccagagaacaatcccagaggagtttccctcgtctctgtgaccgcccacgaccccgactgtgaagagaacgcccagatcacttattccctggctgagaacaccatccaaggggcaagcctatcgtcctacgtgtccatcaactccgacactggggtactgtatgcgctgagctccttcgactacgagcagttccgagacttgcaagtgaaagtgatggcgcgggacaacgggcacccgcccctcagcagcaacgtgtcgttgagcctgttcgtgctggaccagaacgacaatgcgcccgagatcctgtaccccgccctccccacggacggttccactggcgtggagctggctccccgctccgcagagcccggctacctggtgaccaaggtggtggcggtggacagagactccggccagaacgcctggctgtcctaccgtctgctcaaggccagcgagccgggactcttctcggtgggtctgcacacgggcgaggtgcgcacggcgcgagccctgctggacagagacgcgctcaagcagagcctcgtagtggccgtccaggaccacggccagccccctctctccgccactgtcacgctcaccgtggccgtggccgacagcatcccccaagtcctggcggacctcggcagcctcgagtctccagctaactctgaaacctcagacctcactctgtacctggtggtagcggtggccgcggtctcctgcgtcttcctggccttcgtcatcttgctgctggcgctcaggctgcggcgctggcacaagtcacgcctgctgcaggcttcaggaggcggcttgacaggagcgccggcgtcgcactttgtgggcgtggacggggtgcaggctttcctgcagacctattcccacgaggtttccctcaccacggactcgcggaagagtcacctgatcttcccccagcccaactatgcagacatgctcgtcagccaggagagctttgaaaaaagcgagccccttttgctgtcaggtgattcggtattttctaaagacagtcatgggttaattgaggtgagtttatatcaaatcttctttcttttttttttttaattgctctgtctcccaagctggaatgcagcggtacgatcatagctcactgcagcctcaaactcctaggctcaagcaattatcccacctttgcctccggtgtaacagggactacaggtgcaagccacctactgtctgcctatctatctatctatctatctatctatctatctatctatctatctattactttcttgtacagacaggagtctcactatgttgagcaggctgatctgaaacttgggctcaggctagcctcctgcttctccctcccaaactgctgggattacaggcgtgaaccacagtgccccgcccttatcagatattcttttctggctgggcgcggtggctcacgcctgtaatcccagtactttgggaggccgaggcgggtggatcacctgaggttgggagtttgagaccagcctgaccaacatggagaaaccccgtctatactaaaaaaatacaaaattagccgggcgtggtggtgcatgtctgtaatcccagctacttgggaggctgagtcaggagaattgctttaacctgggaggtggaggttgcaatgagctgagattgtgccattgcactccagcctgggcaacaagagtgaaactctatctcaaaaaaaaaaaaaaaaaactttatcctctagtttcatccattgatgacacttgctttaatcacttattacaatcacctccaaatgaagattttataattccattgtttcttctacagttgttaattggctttctaccttgaagaagagttttatattctctatatatgtttgtttctatgattctggaagcatggttttctattttattcaatggcctgtaatctgttaatatcaattatttattttgatgctgaaattgtcccaggattggcctttgggactccctttaggctgatttctatgtcctttctgttacagcaagcttgggattatatccaagatttgtaattccaatgtacttacttctgtcagtgtaaacaaagtacgatttctggactagatgacttgggcattgtgggggaggtggaaattagaggtattctctgtttttcctgtaggatcttgcatttcttcctcttgctgcttgtctctttgtgtcgggaacaggccccccaaaatctggccataaactggccccaaaactggccataaacaaaatctctgcagcactgtgacatgttcatgatggccgtaatgcccatgctggaaggtagtgggtttaccggaatgagggcaaggaacacctggcccgcccagggcagaaaactgcttaaaggtgttcttaaaccacaaacaatagcatgagtgatctgtgccttaaggacatgcccctgctgcagataactacctcaatccatccctttatttccgcccatctcttcgtttcccataagggatacttttagttaatctaatatctatagaaatgatgctaatgactggcttgctgttaataaatatgtgggtaaatctctgttcagggctctcagctctgaaggctatgagacccctgattccccacttcacacttctaaaaaaaaaaaaatttttttttctgagcttggagaaatatatcccttagtacacttggcatttataaagcagacatcaataaatttatatatatgtgacagataccaacaacaatccagtccccttccctcataccttatttatgtacatatattttatataatagatataatttattaacaatttataaaattactttgttaatactctatatcattttctagctgaatttatcaatgataatgctcttttcccacttttatttttttcccattgaccatgcagcagttttgtgtagaccgtctgataacaactgatctgtttatctaggggggagaaatctaattcaatggaaaatataaataaaattgtgataaacttttgtaaatagagtggcttttaactacacttgagatggctagcaaattcataaagtgaatttactttctttcaaagttcagtaattctttctggccattagggatatgtccatttatactttctcagtatcccaagtcatttcatggttttaaatcattcatgaacttccaaatatagtgaatttatttcttctgcatttaaaattttatcacttaaatatacaatataccgtattgccatgacgaaaaatggtaaagactatttttcacttctgttatgcatttcattaatacgatatctgtatgtgtttccaagttagacatttcttttgcccatttcctacactaatgatactaatgatgactttgtggaatattcagaattaacaaaatgtgttttgagtgctttttttagtactggggcaaatttgcagtaatatcgcctgctttttacattaaattccccataacttttacaactatgggaaaatttctgaaacgtgcacagattccaagtgttttctgagaactttatgcttattgtagagtggttacagacactgaatgctaaagtgtattactctttgaaaagcattgcttgatttcttttggtgaattctgtaaaggtgcagggaaacataacgtcccaattattttttctttcttctttgtttgctgcctatctactttgaaagatacaatagttaaaacccagaaaagagattggaaaccccttagagaatgaaagacatccaagggctctaaaatgcggcagttgctgcttctgagaccaaaaaagggggcaaaatatagagtgtgtggttctacttgtgtgattttttgaaagaaagtatttgaatttatctaaaaatactaaatttgtatttacattagttttcaaatagaatttaataagtacagtgttctataggtaatattgagagaaatagaggacaatgaaacctctctcctccatcatcttgtatgaactaccaaaatgtttatcatatggacagttctcatatatagtcaaatagaaagaaagacataataggaaaacaaatgacttgggaaactaagctaacatggtctaattattctgacctctgctcacctaacttgatttaggaacaaatcattgagagttagagcatgaatagtcaagactgttagaccatatctcaaatatcagtgacttcaatcaactatgtttccagtttaagctgaataggctttattaaatagttgttgaatgaatggataaacaaataatgtactctggggattacctgataccaggattctgaattttcagatgtatcatagaaggatagcagctttgcaattaggtaaattgttaactgtgtcacctttagcaagttatttaatctctttgagcttcagcaaagtaggaataatcatatctaatttgaaaggtcgtggtgatggctagggctaacaaaaatctgattcacaacatgcaattaattaacagtagccatttttagtggttgaccaaaaaaaggatttatattttcaatgccagcacactcgatgttctgttgggaaaaataataatgatttttgtgtgcttctccatatggtataatggaatgatttgtggatggaaataaaactgttctaaaatttttgtgacagctggtttaaaaatcttaagtgcctaggcacattcttgattgagaagccacagttttaggccataaaagatgggggaaagatttttatatgagacaattttgtgagtgttactttttctttgtctgaaccatagtgaaatctaaacaaggatcttgtgaaacttattttaaagaagcagtttacttcaatgggatcttagataatttcaccagaaaatggatcaccgaaaccagaaggctggtgatcattatttggtttgggccatataagaattgaaactaacggcttagctttaggatttttaggacacttgttgataatttaggattcataattaacatatgtgttgattgttttctgagactaactgggcaatgggtttggatgtgtttacatttattctgattccagtcataaaattatgtcaaggactttccttgtctttttatgtgtatgacagatgtgtatgtatccatttcatctaacaagttaaagcgttcagctataatttaaaatttgtagcttcactgttttatagtacctaaaattggaatgtaatcagtcagaagacattcatccactgctttcattccagaagtattatgctttttgaagcagcaatagcataggaatgttgaggagactatactatacttttatagcatatttaatctcgtagatcacttttcaatgaattataaggctgatgacaaatgagcaaattgtatcagttttctttatgacatgtaacagagtatagctgtgatcatgaattggatagttctggtgtaaaaatctgctttatccccatataagatgtcaggttcagaaaagcaaacacatagtttcgaagagatgttgatcaaactgatgaggctaaatctcaagaaagagacacagttaccctctaatgttacactttgagttcacctttttttttttttttgagacagagtctcaatctgtcgccaagctggagtgcagtggcactatcttggctcactgcaacctctgcctcctgggttcatgctattctcctgccttagcctcccgagtagctgggactacaggcacacgccaccacacccagctaatttttgtatttttagtagagatggggtttcaccatattggccagaatggtcttgatctcttgatcttgggatgcacccaccccacctcagcctcccaaatagctgagattacaggtgtgagccaccatgcccgaccactttgagttcacttttaagaaaccatacttaatggaaaattaccagtaacagggcatactgtttaggatgcattcctaaaatattaatggcaaaagatagccagcctatggcaaagctaattggaaaaaatattttataaaggatgagacttctggataccatatgggaagggctctggttcaggaaaatgtttttaaaaaactgtcattgaagagaccatagaatcaaacaaaataatttaatctgtatgtaaaagaagttggtaccaccataatttttcttatacatgtcatataaggatctactctgtgtattgtcattgagggcagatataatttcttagttcatcattaactctctgaagtatttcacacagtagtttgtacaccttctaagtactcaatacaatgcttgagttcaattattggaaagtggtctcttggagaaaaaagaatcatagtgcaaaaccaattattttacatggacttttcctctatatctaagccctaataagaggcagctgtctgatatacatacatacatacatacatatatatatatatatatatatatatatatatatatatatatatacacacacacacacacatatatgtatatatatatttggagtaggggatggagtcttgctctgtcacccaggctggagtgcaagtggtgtgatctcagctcactgcaacctctgcctcctgggttcaagcgattctcctgcctcagcctctccagtagctgggattacaggcgcctgtcaccatgcccagctaattttttaaaatatttttagtagagacagagtttcatcaagttggccaggctgctcttgaactcctgacctcaggtgatccacctgccttggcctcccaaagtgctgggattataggcatgagccaccgcaccctgccaactgtctgacttatcttaaaaggctaaggacctggtttgtttgtcaaattttgaaaatagatgcctcagttcataagatttccatattgtgtggcaggcgcctgtaatcccagctactcaggaggctgaggcaagagaatcacttgaacccgggagacagaggttgcagtgagctgagatcacgccactgcactccagcctgggcgacatagtgagactctgacaaaaaaaaaaaaaaatccatatgtgaaaattcttagaagcttcctatacaatttcagctgaagattcagccaacagttcattctgagactgtgttccatggaaaaagtaaagcccaggcatggaagtgggaatggaaagaaagattctaagcctacaaatactcaaacatcaagaagaaataaaaataagtcatcacttcgacttcatgtgctaacatcactgaggttataaattcccaggaatattttattgcgggagcaagactgcactgctgcctttcagcttgcaaattccagtgagaaacgtctttctctctgctctcaactaactctacagaacgctgtcctctcatttcttcaggctgcagttctagagtagggactcagagtgccactgttggccagtctggaaacagagataaatgagccaatccccagacattccggcttggtggcttttctaatttcatggaatgcaaatccaagagcagacccacaacattcctattatggctcctagttctacaaattataagcaggaacggaacggatttacaggcaatgagttcagctccttcttggctggagattctataatccaagaagagtttgaaaaggggcttatttgggctggagcagcagcaactctaactgtggaaaaggtggggaatggtgctggactgacagtctgggtagaaccaaggcgactactgcctcctttcctgctatttctatcctgctgggcattctctatgatgcagatccgttattcagtcctagaggagctggccaagagtttggtggtgggaaaccttgccaaggatctgggactcagtgtcgaggacatgcccacttgaaagcttcgggttaatgctgaggaataatacttcattctaagtggggaaagtggagacttacttgtgaatgactgaatggatcaggagcagatacgccccccaattatagcttgggccataacgctttgaaatagttgaaggccaggcatggtggctcacacctgtaatcccagcactttgggaggccgaggcgagcagattacgaggtcaggagttcgagaccagcctgaccaacatagtgaaaccctgtctctactaaaaatacaaaaattactgggcatggtggtgcaggcctataatcctagctactcggggggccgaggcaggagaatcgcttgaacccgagaggcaatcgcaccactgcactccagcctgggtgacagagcaaggcgccatctcaaaaaaaatgaacaaacggtagttgaaaattctttaaatgtttttcacattaatatggagattcaggatatgaagaatcatgcaccacggttcagcaggaatgttattaagttacgtatctctgagtttacccagctggaacaagatttgcaacagaacctgcagaagatcctgatgttgagagaaattccttacaaaattatcaccttagcagcaactctatatttctctttgaagtaaaagtgaccaacagtggaaagacatatgttgatcctgtgttagagaagctgcttgactaggaaaagcagagctcccatcccttagtgctagcagccttagacggccccccaacaaagcagcatcactcaactcctgatcctattggttgaagccaatgacaaccctgtgttcatctaggatgtgtacagcgtcggccttcaggaagatgtgcatccgggcactcctgtgctgagagtgagggccaccaaccaggactagagtgtcaaggcagagatcacatatggcttcacaacccagagtacccatatctagtttggccttgatcaaatagtggagaaatgaaaactttaagtacattggacttttaaagatttttaatttccatggttttggtagcaagtgacagagagggactcattgtccagtgtacagttgagaccgaatttctagaagataatgacaatatcctagaggcgatttttacttctaattccacaatgattcccaaagattctgcaccttggacagtaatcactgtccaggatttaaatcacaagatctttaaatcacaagatctggattcgggagaaaacgaggtcacatgtctgatataagaaaatgcaccttgagaaaaatcttcctccaataattaactacatgcttgtaacaaatggggccgtggaccaggaacagacccaaggtataacatcagcatcactgccactgacagaggcaaaccaaccctctcgtccagcccaagcatcaccctactcattggcgatgccaacgacaatgctctggttttctaccaggcctcctacgtcgtccacgtggccaagaacaatcttcccaaagcctccatagtgtgcaagtagacacctccaacctagacttgggacccaacagccaagttccctattccatcgtggccagtgacctggagccacaggcgctgtgattctaggtgtccttgagcgcacagtgcgccttcgaccaagagcagccgcgagccttcaagctcacgctgcaggcccgcgaccaggactagctcgcgctcggcgtcaacgtgagcctgcgcgtgttggtggacgacctgaatgacaacgcaccgcgggtgctgtaccccagctctggagcgcaatggcttcgcgctcttggatatggtgctgcacgccgcggagcctggctacctggtcaccaaggtggtggctgtagacgcagatgtgagacacaatgcgtggctgtcctaccacgtgctgcaggccagcaagcccaggctcttcagcctggaatgcgcaccgacgaggtgctgacagctcgcacgatgggccacaggaaagcgactcgccagcgcctactggtcgcggtgcactgcggtggacagccgctcctctcgctaccgccacgtcaccaccactaccgcccctcgtcgccgacagcctgcaggagactctgccagacctcagcgatcactctgcaaagctacagcctgaatccaaaattaatttatatctggtgattgccttagctttaatttcctttttattcttcctgattgcattgtttgtgctggttttaaagtgccgaagaccccaaaatgatcctgtctgagtctttcccacggatgtctatcccgcgctaagccccaggtttctgggtaactgtagctctatgatgccatattcctaccaggtgtgtgcttctcctacgaatccagggctgagtgaacttcttttttgaatccctacccctcaggactcaatagcagtttcactgcagaaagccccttggggaaggggatgattgtgattattctaattgcttgggcagaatccactctccaaggtgaaaaattcttgatgaaactaagttcagtcacaagcaggttttcttctagcattaaatattttcagagatctcagtaaaaagcatttctagcagcaagaccaaaggcctaagatgagaaatatttggcatggtgagcttgagggacagtagtcaggcagacaagagtatcagacatgccagagcatttggggcctgtaggtaaggagcatgttttgattatatatatttgtatgtgtttgattatattttataattttactttgatattcaaattgtactgatccaaaaataagggagggacaaatcttggccattgtagtatgagagatgtaaatttacaactcagaatccctgcttatcacttctccttcagcacacaactgtttcattttctatttaagaaacttcctctcactgcaaaaagacattctggctgataaagttagcctataatttcagtaaatctaagaatatgactaatggaagttgccagacctaaactttgaaaattattgttccactgaagagcgtcttatgactgagtgttccagtctccttctcaagctgaaccttgcttttcaaaccagattaagaacactatcataagttatactgcattttatttccctacccatgtccactgcatcattctctatagtacaaagagcttgtctcgccaggcgcatctataatcttagcactttggggcgccaaggcgggtggatcacttgagcccaggagtttgagaccagcctggacagcatggcaaaaacccatctctacaaaaaaaaaaaacaaaaattaacaaggtttagtggtccatgcctgtggtctcagctacttgggaggctgaggtgtgaggatcacctgagtctggggagattgaagctgcagtgagctgtggttgcgctcctgtactccagtctgggtgacagaattagaccctgtcccaaaacaaacaaacaaataaagagcttctctccttatgacttatttaaagcttgggaaattgttccaattcaaatgctttaaatggacttgagctaaaacagaatgtggtatatgaaatgttcttataatcaggtgattgtaaaaattgatccagataatgttagcatagcattttactgaactagtagtttacaaacacttcaaaaattatagaataacatttgcatataaaattcctcatacatttccctatcagtgaattggaagcttacaatatacaatattaccaaaaagacaaaaaaaatgaaaaggaaacagttacctttggaaaacataattaggtaaaatgggtaatatggaaagtctgaaaactgaaaaaattactgataagtcaagagaaaaggaatattagtaggaaaattcataaaagtgtgtctgactactcacagcaggtttccttattggtatgtattctgtggtccatctaagctatgttaattttattttaaatgctacctgggtattggcttctaaaaggaattcagtaaatcagataatttggcatcttcaatctagattctgatgctcacctgaaaagtctgctaaggattggaaaccaagaaaagtgaagtatctcaacagatatgtgtcacttgtgtgtactggattttttttttttttttttttttttttttttttttttgagatggagtttcactcttgttgcccaggctggagtgcaatggcatgctctcggctcactgcaacctccgcctcccaggttcaagtgattctcctgcctcagcctccctagtagctaggattacaggcatgtgccaccacgcccagctaattttgtatttttagtagagacggggtttctccatgttggtcaggctagtcttgaactcccaacctcaggtgatcttccctccttggcctcccaaagtgctgggattacaggcatgagtcactgcgcccggtcgcgtactggatttatattgtgtaatactttgctctagcagtatagtaggtgagacagtgactgtgtctagtgagcaaaaggcacttatttgacacttttgactcttcctttctacttaccttatttaaaattgatttttgcatgtggcatgatgcaccagttcattgaggtaggggttgaagttatttcccatttttttcaataccatttattaaaaatattttcctctttctgttgaatttgcttggtgcctttgttgaaagtcatttcactgatatatgtagttctatttctatattcttgatcatgtttcatttgtctattcttttactaatagcacactgtctcaattattgtagctttatagtaagtcttgctacaaagtcttactacaggacaaagcttgtaggatttttgaatgggatggcattgcatctatacctttatcagggaaagagggaaggagggaggaggatcatcttaacaatattgacacttcaaatccatgaacatggtatatatttccatttaattaggtctttaatttctctcagctatgttgtatagttttcagtgtagagaggtcatgtatatttctcattaaattgtccctacatatttgatgttttctaatgttattgtaaatagtatttttaaaattgtatcttctaattgttcatttctagtttacagaaaaatgaaaaactatgtttttatgtattctatatgcttttgaaaagtaagaggtgcaaagtgctctattcttacactatattgtgtgagaatataagtcgaaaccactctgcataagttcaggcttccattctcttcagtttgtaggttgagagaacccatccagaaacagtaaacattggtgtctgcccaagtctggtcctgggtggttcattcattcatttacataacaaatatttattaactgtctgctatatgcaaggcactgacctatggactaaggatgcagcaatgaacaaggcatatatgattcctgagttaatgggccctattctaatacatgatattttacaggtctgataaaagccaacaaggagaaatacaaaagcactaagagaaagcttatagtagggaagcttcgcctaatctgaaggtcaaggaaggctttctttttttcggaaagtgatatttagagagatgaatagattaataggatgagtagaagttatctaggtaacaaggaaagtaaaaaagaaattgtcaggcagaggaaatagcatgtgtaaagatctttttaaaaaataaaaggtgtgactcaagcaatttaaaagggctagggaggctagaaacagaaaataaatagatgaaactaataaggcagggagagccttgtaaatcacacttaaaattctggattttgttctaaatacccttgtacttaggagctattaaaatattttaaacaaggcagtgacaagatatttgaattattaagcttactctggctgctatatggagaattgatttatgagggttataaatagaaataggaagataagataggagactatggcaatattcctggtaagaaatggaagaagagctggcttggattaaaggggaggcagtggatgtagaaataaatggatgaattatagatatatttaggaaatgggttcaataagacttaataatggaataggtggaatataaatttcatgagggcagggggtgttttgtttattattatattcctaggtgtctgaaaatattgttgtgttgcctggcaagtggtagatcttcagtgaaatattattaactgaataaatacaatggataaatggggagcagggattaagagtgattcctgggtttccacattaaggaactggatggacaaagctaccatttgatgagaatggaagactaaagaatgatagatttaagagaaatcgagttgagttccagccatgttcatttgaaggatctgagaaacagtgcagatattcagtgtgtgattagacatatggtcatcattcttttttttttttgagatggagtctcgctctgtcacccaggctggagtgcagtggccctatctctgctcactgcaatctctgcctcccaggttcaagtgattcttctgcctcagcctcctgagtagctgggactacaggcgtgcaccaccacgcctggctaatttttgtatttttagtacaagacagcatttcaccatattggccaggctggtctcgaactctgatctgcccgcctcggcctcccaaagtgtggggattacaggcgtgagccaccgcgcccagccggttaccattcttttactctgagttcttccattgtgatcatctagtcagatgggtagatccttataaggctgagcataataagcttcctgatagctctacactggtatgttttggggttcatggctgagctacttttgtgttttatttatcttcctgatctctttttcactgtaagaaacatccagcacccagggaaatttgctgtctaattcatactccactcttcagactagtcctagtgttcagttttgttttgttttttttctgtgtctggaattctattaaaatgtgtcaggctgttttaatttttgttgtttaattttctttcacatgattatatgtgctccatggatttttttgtttgtttgttttttgtttttgtttttgtttaagcggggtcttgctcttgtcgcgcaggctggagtgcaatggcttgatctcggctcactgcaacctccgcctcccgggttcaagtgattcttctgtctcagcctcccaagtagctgggactacaggcacatgccaccacacccggctaatttttgtatttttagtagagacgggtttcatcatattggtcaggctggtctcaaactcctgaccctggtgatctgcccacctcggcctcccaaagtgctgggattacaggcgtgagccaccgcacccggaggaaatttttaacctcagtttttcttcaccatctgtaaaactgcatagaaggaatgtttaggataaaagatgcataacaatcataacaaaattgttgggttttaatgttatgagtacacttggaggattctatgtccacacataccttaaacatcctatagagtccttagcattttaaagttgaaaccaacagtatgaatgatggtagaattttcccccccaggaagttagaactgttccatatcttgatagagggatgggttataaggatgtacacattttccaaaactcattgaacttaagagtcttgcatgtgactgtatataaattatactttaattgaaaataaatttaagaaaataaaattggctgggcgtggtggctcacgcctgtaatcccagtgctttgggaggccgaggtgggtgaatcatctgaggtcaggagttcgagaccagcctggccaacatggtgaaactctgtctccactaaaaatacaaaaattagctgggcatggtggcggacacctataatcccagctactcgggaggctgaggcatgagaatcgcttgaacccaggaggtggaggttgcagtgagccaagatcatgccattgctctccagcctgggcaacatgaacgaaatgccatcttaaaaaaaaaaaattaaaagaaaagaaaattagcctcccccaccctcactatacctcagactcacccctgaaagatcactactattcatccctggttatgtacacttacaaacattttctgtgtgtatgcgaatgtatgtgtggggttttctttgcacaacaggatcattttacagtatatatactgttgtgcaacttgctctttccacttaatatctcaaggaatcttttctttgaatctttatagccatgtacctcaatcttagtagttttctttattttatttttgaataggaaatacatttacatggttttaaaaatcaaaacaatatactatgtatatattgagaagtctgacttccatccctatcctactcctattccacccttgcttcctcctgtcccctgtaggtaaacattttataactttattaagcatcctgtcagcatttcttatgcaaatatgtacatatatttttatttccccattttttttacaaaaagataaaatactatacaccactttatatcttcctttcttcacattatatcctttaaaaatatttccatattggccgggcgcggtggctcacgcctgtaatcgcagcactttgggaggccgaggcgggaggatcacgaggtcaggagatcgagaccatcctggctaacacggtgaaaccccgtctgtactaaaaatacaaaaaaaaaaattagccaggcgtgatggcgggcgcctgtagtcccagctactctggaggctgaggcaggagaatggcgtgaacctgggaggcggagcttgcagtgagccgagatcgtgccactgcactccagcctgggcgacagagcaagactgcaactcaaaaaaacaaacaaacaaacaaaaaagaacttccatattaatatatagaaagctgttttttttaacagttgcttagcattcctttggattattaaccagtctcataaatgagcgctattgaatagccctgtacctacatcagtttttacatatgcagtatatctttgggatgaattcccagaaatggaattgaaattgctgggtcaaagaggaaataggtgtaattttcttaggtattttcacaagaagtgttaattctaactttctgttttgaaatgatttcaaattttcaaaggagttgcaagaattgtacaaagaactgtatctccttcacccggatgcaccgggtgaattatatgtattatataattgtatctgtaggccaggtgcagtggctcactcctgtaatcccagcactttgggaggctgaggcaggtggattacttgaggccaggagttcaagaccagcctggccaacatgataaaactccatctctactaaaaatacaaaaattagccaggcctggtaccccatgcctaagggtgaggcatgagaaatgcttgaacctgggaggcggaggttgcagtgagccgagatcgcaccactgcactccagcctgggcgacagagcaagactctgtctcaaaaaaaaaaaaaaaaaaagtaaaaaagttttttaaaaagatgtatctatatatacatatttacatacacacccaagtgtgtatgtatatatgtttgtgtgtatgtacacaaacacattatttttatatgatatgatttttttatgacatgattatttttatgacatttgagagtaagttgtagaaattatgtttctttattcctaaatacctcattgtgtatttcctaacaaggacattcttttatataattaaattttaataataaaaatcagaaaatttaacatcaatgcaatataattatttagcctatagtccatatttaaattctaccataccttatagtatattttactatacctcatagtaattttttttagtccaaaatatcacacattgcatttagttgccatgtctcttttttttttttttttttgagacagggtctcactctttcgcccaggctggaatgcagtggtatgatcttggctcactgcaacctccgcctcccaggttcaaatgattctcctgccttagcctcctgagtagctgggactacaggcatgtgccaccacactcccaccacacccagctaatttttgtatttttagtagagacaaggtttcactatgttggccaggctagtcttgaactcctgacctcaagtgatctgcccacctcagctaagtgctgggattacaggcgtgagccaccatgtgtggcctagttgccatgtctctttaatctactttaatctgaaacagttcctcagccttgtttgtttatatgaaactgacatttgtaaagactagaagccatttgtcttgtataatgcctttaatttatatttgttttatgtttcctcgtgattttatatatagagtttgtttgtttgtttgtctgtttgtttgttttgagatggagtctcattcttgtcacccaggctggaatgcagtggcgcagtctcggctcactgcaacttctgcctcccaggttcaagcaattctcctgcctcagcctcctgagtagctgggattacagatgcctgccaccatgcctggctaatttttgtacttttagtagaaacggggttttgccatgttgcccaggatggtctccaactcctgacctcaggtgatccgcccgccttggcctcccaaagtgccgggattacaggcatgagccaccgtgcccggacctcatgattgtatttatttatttatttaatattattattattatttttttttttttgagatggggtcttgctctgtcacccaggctggtgtgcagtggtgcgatatcggctcactgcaaccgctgcctcccagattcaagcaattctcctacctcagcctcccaagtagctgggattacaggcatgtgccaccacacccggctaatttttttgtattttttttagtagagacgaggtttcaccatattggccaggctggtctcgaactcctgaccttgtgatccacccaccttgacctcccaaagtgttgggattacaggcgtgagccaccacacccagccttatgattgtatttagactagacatttttttggtagtatattatttagccattgctgtgtaacaaattatcccaaaacttagtggcttaaaagaagcatttattatctcataaattttgtggatcaggactgggtatagctttgctgagtgcctctgcctcaaagtcttacaaggcagcaattaaagtgtcacctaaggctattgtcttatctgaagggtcaacagaggatggatccgcttctaatctctctcacatagttaatggcaaaattaagttccttgtggattgttagactaagggttccagttccttgctggttgttagcttgaggtctacctcagttccttgccatgtggacctccatagggcaaccagcttctgttagagcaagtaaaggagagtgccagagagggcaaatgtgatgaaagccacaatctttttataaacctaattttgaaagtgacatacaaggctaggcatggtggctcaaacctgtaattccagcactctgagaggccaaggagggtggactgcttgagcccaggagttcaagaccagcctgggtaacatgacaaaaccctgcctctactaaaaatacaaaaattagctggtctggtggtgcatgcctatagtcccagctactcaggaggctgaggccagagaattgcttgaacccaggaggcggaggttacagtgagccgagatcacaccactccactccagcctaggccacagaatgaaaccctgtcaagaaagaaaggaaggaacaagggagggagggaggaaggaagggaggtagggaggcagggaaagaccgagaaagtgacataccatcatttttgctgtagtttgttcattagaagcaaaatcacttggtccagcccacactctggggagatgattttctaactccatttgtaataacttattctacttttattagttggcattatacagtaagaaagagctttcttttctcttcttatttattcatatatggctcatgtgttttttccaatgagttatattctattactaacattttttattttgacctcaaattgttttagatgttaccaataagaacctcttcaagctggttcttgtgtccttttgccataactctctcattttcttgaaccctttcttactttctgatataagaaaatattagagactcatactttccttgttccagttctgagatgaaccatttatccaaaagccttgcttcattttagtagggaatagtatttagaaactaagatctgggtgtgaggtatgctcactgctaatgggctgtcactgtttctaggccttgtcagcagacggagctaggaaaaacacacataaacacacccatatttatatttgtacacacactccctcaaaatcgtgagttcatattgatacctccagttctggttcttcctagccttccccctttccatctttgtatttttattttccaacagtaagaaccctggctcccagtgctatgaatatatttactcatttgctccatccactgcactccagcctaggccacagaatgaaaccctgtcaagaaagaaaggaaggaatgagggagggagggagagaggaagagagagaaggaagaaggaagggagggagggaaaactgagaaagtaacataccatcatttttgctgtagtttgttcataagaagcaaaatcacttggtccagcccacactctggggagatgattttctaactccatttgtaataatttattccacttttattagttggcattatacagtaagaaagagctgctgaagatttgcttgcaattggttgtctttaaactgagggtatattgtcaaagtactgtgctgaaaagttacctgtagtatagttatgtgattcattaaaataaagtttgtttctattatgtgcagttttagagttttgccacactctggttgattagtatattttctgttgcttttttgttttgttttgttttgttttgtttttgagatagggtctcgctatgtcacccaggctggagtccagtggtacaatcacagctcactgcagcctcaacctcgtgcacttaagcgatcctcccacctcagcctcccaaatagctggggctgcaagtgcacaccaccatgactggctaattttttaattatttatttatttatttatttattttagagatggggtctcactatgtttccccaggctgaccctgaactcctggggtcaagtgatcctcctgccttagcctccaagtgctggtattacaggcataagccaccacacctagcctagtattcttttttgaatatgtaaaacattaacataaagtcaaaactattaaaaaaaggtgtactcagaaaattgtcattcctcccctataccttctgcctcattcacaccacactctgtagataatcgatttcattagtttgtggtttatcctcactgtgtttctttttgcaaaacgcaaaaacaaaacctatacatatttatattttcttatgtcctcttctttcttacacaaaaggtaacacactatgtaggtagtcctggctttgaacagtttcactataaaaatatttgttactacagcttaaataacataagtctcctaaaaataattcaaattttagttaccatggtatattaactttgagtagttccataaaggacaaacttggctgctagcccttcagtccacagagcactttgaaaataacagatgagcaaaataatgtggccaatcacatgacttctttcaaagtatgtcagtgatcagtcactgtgtgcctataatttagttcatgcacagacagcaaagcatgtagttgtgttgccttccagtgataaacccacataacattttagaaaaatgtattaagaattggccagcaaagataaaagtgcagcaaagaaacaaaagtgataatgttttcagtgaaatttgaattgaacataaatggagttatagaagaaatagctgaccatgggaatgttcacactgctactttcaagaatctctagaagggcagctaaaggagcttagtgaaggtgaatttattgacatgaatgagaaaagtaattgtgatgaaaaggatgaagatgtcccagagaaagtaatgccagcaaaaacttcacattaaaggaactctcagatatttcaaagcattgaaacctccaagaataaataaaatgttggaagttgatccaaacttagaaaggagtatggcaacttgtcaagatgaagaaaaggtgcttattcctttttatttatttatttagagacagagtttcactcttgttgcccaggctggagtgcaatggcatgatctcagctcaccgcaacctccacctcctggattcaggcagttctcctgcctcagcctcccaagtagctgagattacaggcatgtgccaccacgcccggctaattttgtatttttagtagagacagggtttctccatgttggtcaggctggtctcgaacccccaacctcaggtgatctgcccacctcggcctcccaaaacactgggattacaggcatgagccaccatgctccacctgcttattccatattatatgttataggatgaaaagaggccaaactaatcttgacatgttttttacaaggaaataatcctccatggttctaatttttttttttttttttttttttttttttgagacagagtcgcgctctgtcacccaggctggagtgcagtggcacgatcttggctcactgctagcaccgcctcccgggttcacgccattctcctgcctcagcctcccgagtagctgggactacaggcgccggccaccacgcctggctaattttttaaaaaatatttttagtagagacggggtttcaccgtgttagccaggatggtctcgatctcctgacctcgtgatccgcccgcctcggcctcccaaagtgctgggattacaggcttgagccactgcgcccggtgggtctaatgttttaaattacactgtgttaaataaatattagtttgttggttttttttttagtttttttatttctctacaaatttacaaccaataagagtttttaatgctttgacaaaaaatgttaaaggtcatagtacaatcgcatttcttcccattgattattaacatcactttacatagtttcatcttgcattagcaattttgtgtgtgtgtttgtggttttaaggagcggagagtttaataggcaagaaggaagggagaagacagaaggaaggagctcccccttacagagacagagggagcggggctccaaaagaggaggtccccatctaccgcggataccagccaggtatatatgcagaggctggtggaggtgatgtctgatttgcatagggctcaggggattggtttgaccaggcatatcattcacgtagcccgagaaaaagctggccctcccaccccagccttttaatatgcaaacgtagggcgccatggatgttctaaacacgtggagatatgtggggggcagccatgtggccaggaacttgtggggcaagggcaagaaggctgtgggaatcgccaagttgaatggacctagtttctaatggcctgcatttgcatatcaaaggttgctggcctggctcctagagccggggctttaaaagaaacttttccggagatgctttaaaaaatgaaaacttcccaaggaccccttttcctgtctatctgcataaaataatttcttttattatttatttatttatttatttatttatttatttatttatttatttatttattttgagacggagtctcgctctgtcgcccaggctggagtgcagtggcgcgatctcagctcactgcaagctccgcctctcgggttcatgccattctcctgcctcagcctcccgagtagctgggactacaggcgcccaccaccacgtccggctaattttttgtattttcagtagagacgggatttcaccgtgttagccaggatggtctccatctcctgacctcctgatccgcccgcctcggcctcctaaagtgctgggattacagaataatttcttaataactcctaccacattcctccctgtggcgatatcaaactaactgctgttaggaggctttgggcgaccattgcttctggctacttcctgctgaaaaggggcgtctaatggagaacagcagctagggctcctcctggggttgatctaagggtcctcggaagaatggcgtccatgtgtggttcagtttacagcaccgtttggagtttgattgcttctaggcgagaagaaacaattcaagttatagtattgagtatacagagtccaaatatcaatacaagacatataagcaagagagtgcttaataaaggggttaaccaattccataaagaagactggaagtaattaaagagggattgtagccactcggggctgaagcccacattttccctgagcctgtcaataattttgatttgatttttaagtccctgtagatttgcctcttctttactacaggtgttaatcccaaagaagcatgtttcatttaaaaatgcattactggccaggcgtggtggctcgcgcctgtaatcccagcactttgggaggctgaggcgggagcatcatgaggtcaggagtttgagaccagcctggcctacatggcaaaaccccatctctactaaaaatacaaaaaattagccatcgtggtagtgggcgcctgtaatcccagctaattgggaggctgaggcaggagaatcgcttgaacccgggaggcagaggttgcagtgagccgagatcgcaccactgcactccagcctgggcaacagagcaaaactccatctcaaaacaaaacaaacaaacaaacaaacaaaaactgcattactaaatccaataaaaagtcctagtagactcagtgatagtaaaactttcatgcttcctttttgccagtaactattatccctgctataaggatactaattaagcaaaatacgacagcaatggaaactctgtccaatatttcagttagaaggtgctaccatggataaccctattgcaaatagtagagtgaggaaagcagttcccacaaatgtggtgtggtaggtaatttccatctaaaattttacttgccaacatatagaattcccctctgtgggcctacgaagttccttggttttattttcccaaacaaagaaacctccgggttacaggtaccttacttactttcattacctggcacaatttgcaaaataattgcccagaactagcatattgattcacattttcacattacccatccctttttcccccccaccaagctgcagaagatcaccacttgattcacaggaataagcagggccagggttagtctaaaatgtaggcaaaaagcttaaaaacaattaatgagactagggtttaatgacaaatgtatgataagctttggagcaaaatttttctctccagtcctcatttttggtaaaaactaattatgaatgaactttaatcttatacttggcctgattatttgcatgaagtgcagcaagaatggttatttctacataggacttttggattggctttgatgaaacactgttccacaaggaatttcagattagacttttaaagctgagcccagacatgggtttgtatcctctaatacctgtgagttgggttatcctctcctcttgaggtcccaagataaactcagagcttccagacctgttagaaagtgacattcttcactgaccacaggttaggaaccctgtgtggggactgtgtagacaaggtgtgaggccagttctccccaaggggcttttattggctctgcatgtcaagcttgattccttaaagggaaacacaccctttcagttaaagccttggcaaaataaccggtttttccaattgtgttctgttgacaaagaaaaatggattcttgctgcactgatgcgaacaactatattgccgtaagttaagagtacttacagatagtctccaaattttagaggaaccaggcagagaaaaatgaacatgctccaaattttgttcacagtagtataccttacttgattattaaaggccataaatagtttaaaataagtttcctttcccagtccatgcaccaaaatgatacggctctgatgagtggaggaacaacagggttcctggtcctcatgctggtttagataaaatgacacagacacatgtggagtggttttaaggagtggagagtttaataagcaagaaggaagggagaagagagaaggaagacgctcccccttgcagagacggagcgggggttccaaagctgaaagaggaggtcccccacattaacaatttttaaaataccgtacaactgcagaaaatgaggactgcctgtacatactgtttgacactttgtttttttttttaacttatcaactttattttgtttgtttgttttggttttgggtttttgtttgtttgtttgttttggagacgagtctcactctgtcagccaggctggagtgcagtggcacaatcccagctcactgcaacctccacctctcgggttcaagcaattctactgcctcagcctcccgagtagctgggattacaggtattcgccaccacatccagctattggttttggtttttgagacagggtcttgctgtgtcacacaggctggagtgcagtggtgtgatctcagctcactgcaacctctgcctcccaggctcaagtgatcctcccacctcagccttccaagtagctgggactacaggcatgcacaccatgcgcagctaattttttctattttttgtggagacggggtctcactatgttgcttaggttggtcacaaattcacagcctcaagcagtcctcctgcctcaccctcccaaagtgctgggattacaggcatgagccaccacatccagccttaccagctatattgaagtataatttatataacataaaatttgccttttaaaattatacagtgcaatgcattttgacaattgtttacatctgtgtaaccaccatgcaatcaaaatatagaacatttctataaccttcaaaagttccctcatgcccctttgcaatcaattcactacttctccagctccaggcaacaactggtctgcttcctgtcactataaattagtgttgcctctttcagaatttcatctaaatggaatcctataacatatactattttgtatccatcttcttttactccaaagttcttgaaattcattcatgttcctgtgtgtatcagcagcgtgttccatttgattgttgagcagtattgcattgtgtggatatatcacaatgtgttcattcattcaactgttggtggacatttgagttgtgtccagtttagtgctattctgaattaaagtgatgtgaacaatcatgtacaagtatttttgtaggcatattttttttatttctcttggataaataccccaaaacagaattgttttgggggtcatatgaaatgggaagtatatgcttaactttataagaagctgccaaactatttttcaaaatggtaatatcactttacattttcatgagcaatgcataaagcgttccgcttgctacattttctcaccaatgcttcctattgtcaattttttaaattttagcaattctagtgggtgtgtgatactatctcattgaagtttcaactgtttttccctgttgactagagacactgagcaacttttcatgtgttgtctatttgtatatcttcttgaagcattcgttcatctttaactgagctgaacgccttcttaaaattgagctatgggagttttaaaatatatccttgtagctgggcgtgatggcaggtgcctgtaatcccagctactcaggaggctgagacaggagaatcgcttgaacccaggaggcggaggttgcagtgagccgagactgcaccactgcactccagcctgggcaacagagtgagacttcatctaaaaaataataattatacatgtaattatatatgatttttatatatgtaatatatatattcttgatgtgagctctttgtcacatacatattttgtggatattttatcccagactatgacttgtcttttcattttcttagttgtgtcttttgaagagcagaagatgtaattttgataaagcccaatttattttttcttttatagtttgtatttcttatgtcctattcaaaaactccttgcctactgaaaacttatgatgattttctcctatattttcttttagaagttttatagttttaccatttataatttggtctatgaatccttttgagttgatgtttatgtatggtgtatggtgtgaggtaacaatgaagattcatatttttttccaaaggaatatccaattgtctctttggaaaaatatgctgagaaggctatcttttccccaccaaataatcttagcaccttaatcaaaaatcatttggccatggacatatgtaggtgtgggttttttctgggctctctgtgttagatggatagatagacagatacagatatataactgtgtttacacatatgtaactgtaaacacagttatatatctatatatccaccaacagttgaatgagaataaactattgttataagcatatatacacattgtatatatatgtgtacatatacatattgcatatgtatgtatacatatatacacacaaagtatatatatgtatgtatacatatatacacacttaaagtaatggcctccagttcgatccaagttgctgcaaaggacattatttcatgccttttcgtggctgagtaatattccatggtgtatatatatatatgtgtgtgtgtatatatatgtattatgtatatatatatgtgtgtgtgtgtgtgtgtgtgtatatatatatatgtgtatatatatataccacattttctttatccactcattagtcgatggggacttaggttggtttcacatttttgcaattgtgaattgtgctgctataaacatatgtgtccaagtgtctttttcatataattacttattttcctttgggtagatacccaatagtgggattgctggattgaatggtagatctgttttttgctctttagagaatctccatactgttttccatagaggttgtactaatttatattcccagcagcaatgtgtaagtgttctcttttccccacatccacaccaacatctattgttttttgactttttaataatggccattcttgcaggaccaaggtggtagctcgttgtggttttaatttgcattttcctgatgattagcgatgttgagcattttttcatatgtttgtgggccatttgtataccttcttttgagaaatggctatttgtgtcctttgcctactttttaatgggattgtgttttatttttcttggtgatttgttagttccttgtagattctggatactagtcctttgtcagatgtgtactttgcaaagataatattttggatgttatatttccattataatttagttcaaagtattttctaatacaccttgcaatttcttctttgacccatggattattttaaagtttgttattttgtttgtttattttgagacagagtttcactttttttgcccaggctggagtgcagtggcacaatcccggctcccagattcaagcgattctcctgcctcagcctcccaagtagctgggattacaggtgcccaccaccacacccagctaatttttttttcttttttttttgagacagagttttgctcttgttgcccaggctggagtgcaatggcacgatctcggctcactgcaacctctgcctcctgggttccagcaattctcctgcctcaacctcctgagtagctgggattccaggcatatgccaccacgccaggctaattttgtatttttaatagagacggggtttcttcatgttggtcaggcgggtcttgaactcccgacctcaggtgatctgcccgccttggcctcccaaaatgctgggattacaggcatgagccactgcacccagtccaattttttgtatttttagtagagatggggtttcatcatgttggccaggctggtcttgaactcctgacctcaggtgatccgcctgcctcggcctcccaaagtgcagggattacaggtatgagccaccatgaccagcctaaagtgtattgtttagtcaccaaatatgtaagtattacccaaatatatttgtcactgatttctaatttaattgtattgtgatccaaaaatatacattgtatagtttctattcttttaaattcgttaacatttcttttatggcacagaatatggtctatcttggtgagtgttgcttacacacaactgtgtaactgaaaactgtgtattctgcttctcgtggttgttgtatcctataattgtcaactagatcaagttagtaagagtgttgttcagtgatcttttcttcttcagtgtttactgtatttgctaatcccatccagtgaagtttccatttcatatattgtatttttcacttttagaagttccatttgactctttcatttccatcctcaattatcttcatatttttctttaaatttttgagcacatttataatggaggttttaaagtccttgtctgctaattttgtcacctctgtaattcctatgatgattttcttcctggcttggggtcataatttgttgcttatttgcatgtctaataatgtttttattggacagcagacattgtaaatgttatatttttgagtgtttggattttgtctttctttaagaactattgcagtttgttttggaaggctattatgttttttgcagatcaggttgatcttttcaaggcttgtttttaagctttgttaggacaggtctgtagtaacttttgccttgggctaatttagacctaccacttaattctgacttttttgattaatctgagtgttcagcagggtctctttattatggctaaatgaaattcaaacattttccagccctatgtgaccatcaagaattcagctaatagctccctggcagttcttcgcccagctgcagaaaagtgtcagtgcactctatgtatgctcagattattatttagccaaagacttggggatccatattaatattcctggagttctttgtgtagctccattctctttagtactctatcccataaattctggctgcctcaatctcctaatctccccaaactctaatatctattcctcaactcagcaaaaccatggtgttattcttggatttcccctttcctgccccacagtctgaaagttgtctccaggcaaaaaaaatggagatcctagtttgcggatcctcatttccttctccttttttttttttttttttttttttttttgagatggagtctcgctctgtcacccaggctggagtgacgtggcgtgatctcggcttactagaaactccggctcccgggttcatgccattctcctgcctcagcctcccgagtagctgggactacaggtgcctgccaccatgcccggctaattttttgtattttgtttagtagagacggggtttcaccgtgttagccaggatggtctggatgacctcgtgatctgctcacctcggcctccaaaagtgctgggattacaggcatgagccaccgcgcccggcctgcttctcttctcttatgggttagaatcctgcactgtcttttgaacaaatgtctaaaagcttttatcacacattttgatccacttcccagttgttatagtggtatatctggtttcacatgactgaaaggaaaagttttcaccttgctttttgtactaataatatatcctggaaatcattctatataaatttatagaaatcttcatttttaaaatagcttcataaaactccattgtaaaaaccaggtgcagtggctcatgcttgtaatcccacactttgggaggccaaggcgggtggatcacctgaggtcaggagttcaaggccagcctggccaacatggtgaaactccgtctctactaaaaatacaaaaattagctgggtgtggtggtgggcgcctgtagtcccagctacttggaaggctgaggcaggagaattgcttgatttcaggaggcggagattgcagtgagctgagattgcgccactgcactccagcctgggctacagagcgagactccgtctaaaaaaaaaaaaaagcaaaaaaaaaaactccattgtatgtgcacatatcattatctgttcaacccatctatgacttgtcatttaggtagtttccatccaatatttttgcaatataaaaaatgctaatgaagaacctgagatatatatatatctatatatatagatatatatgtttgttgttgttgttgttatttttgaagtatgtacgtataataaattcctaatagtgtgattgctgcatcataaggtaaaggcatatgtagttttgttaaatatagctattccccatcttgcattcctacaaatagatgagaatgtccattgtcccatagtctcctttgcagagtatattgtcaagctttttaattgttgccaacctgatgggtaaaaagatatctccaaataattttaattaaaatttctcttattatgaatgaggttaaatagtttttcatatgtttaaaagccagtttatatctttttgtttttttagagacaggaatcttgttctgttgcccaggccaaattgcagtgatgcagtcatagctcactgtagcctcgcactcctgggctcaagcaatcctcctaccttagcctcccaagtagctaggactacagatggatgccaccatgtccagctaatttttttatttttttgtagagatgtgaggtctcactatgttgcccaggcttgtcttgaactactggcttcaagtgatcctcccacctcagcctcccaaagtgctaagattacagccatgaaccaccacaaatgaccctatatatttttttgaattgtctgttcatgtcttattttcatttttctagtagttttttttttaagtgttttagcctaaatttgtaaaaagtttaggggatatatgaagggactctaaatgtttatgaagaaatttaattaaaagataaaaataaaaatataagctttatttttcaacatgagctccatcaagttcaaggcacttttgtaagcaatgatactagccatttagttcacccctaaagaactgagagtcctgggaatttagccatgtcaatgcagtattttttatattggttactgaagaaaaaatgggtgccctttaaagttgtaagattaggaacaaaaacaagtcagaagaagccaaatcagcactgaaaggtgggcacttaatgattacccaagaaaactctcaccaaattgcccttgcttcatgagaggaatgagcgggagcattgtcgtggtcaggaaggattctggggaagttttcccaggcattttttctgctgaagctttggtaactttctcaaaacactctcataataatcagatcttatcactctttggccctccaggaagtcaaccagcaaaatgctttgaacatcccaaaaaagcgcttgccatgacatttgctcttgaccagtctgcttttgcattggtcaaatgccaccacttccacctcttgtgctttgttttcaggatcagactggtaaagtcatgtttcatctcttgttacagtttttttttttttaagaaacccttcaggatcttgatcacatttgtttaaaatttcaactgaggctgggcccagtggctcatgcctgtaatcccagcactttgggaggccgaggcgggcaaatcacgaggtcaggatttcgagtccatcctggctaacatggtgaaaccccatctctactaaaaatacaaaaaattagccgggcatggtggcaggcacctgtagtcccagctactcgggagggtgaggcaggagaacggcatgaacccaggagacggagcttgcagtgagctgatatcatgccactgcactccagcctgggcaacagagtgagactccagctcaaaaaaaaaatcaagtgaaaactctggtcttaaactgcagctgatctattttatttttattttttttcagacacagccttgctctgttacccaggctggagtgcagtggcaccatcatggctcaatgcagccttggcctcgtgagctcaagcaatcttcccacctcaggctcccaagtagctgggactacaggcacatgctaccatgcctggataatttttttgcagctaatctagatgtaatggttttggcacccatctaatggaaagtttgctcaactttaatttttcagtcagaattgtgtaagctgaaccgagatgtctatggtgttggctattgtttctgctgttaattgtaggtcttctttaattagagcacagacaagatcattttttttcctcccaaattgatgtagatggtcttttgctgtgggcttcatcttcaacattgtctcatcccttcttaaaacaagctagctacttgtaaactgccgttttctttggagcattgtctccataaacttttcacaaaacatcagtgatttcaccgttcttccactcaagcttcatcataaatttgatgtctgttcttgtttccattttagcagaattcatgttactctgataggggctcttttcaaactgttatcttattcttcttagtgcctcaaactagatcctattcagacatggtataacaagttagtatgggtttattttggtgcaagaaatattttgaaatccacacatttttttcataatatgcattttccatgaagtttttgaaaactccttgtattaggaatattagtcctttgtccagtaaacagactgcaaatattttctcacagctcatcatttaccttttggcatttttttgcaatgcaatttttttccctttgtttttgttttttgtgtaatgaatcaatgttttcttttttttttttttttagaccaagtctcactctgtcacacaggctggagtacaatggtgcaatctcagctcactgcaacctctgcctcccaggttcaagtgattctcatctctcagcctcccaagtagctgggattacaggcacatgccaccatgcctggctaatttttgtatttttagtagagatggggtttcaccatgttggccaggctggtctcgaactcttgacctcaagtgatccactcacctcggcctcccacagtgctgggattagagacgtaagccactgcccccggccaaatcaacgttttcttatattgcatttaggttttaagtcatagttagaaagcctttccccacacctaggttatagaaacattcattacttttttcttccagtgctagtacttgcatggtttttggtttccacatttagatccctgatctaattggagtttattcttttgtgtgctgagatatggatctgattatatcttttttcccaaatggctatccagttgtcccaatgccatttattaagcacttcatctttgtcccagtgatttgagatagcatctttatcatgtaccaaacttctatagtgccagaagatttttattttttttagacagggtctggctctgttgcccaggctggagtgtagtggcacaatcccagctcgctgcaacctccgcctcacatgctcaagtgcccgcacctcagcctctcaagtagctgggactacaggcacatgccaccacaccaggctgatttttatatttttttgtagaatgagatttcaccatgttgcccaggctggtctcaaactcctgagctcaagaaatccgcccacctcagcctcccaaaatgctaggattacaagcatgagccaccacacccggctgccagaaaattttaatgatcagaaaaccacaattctttcttcctctgttatatgttgaagtaaaatacttcatttagaaaactaagccgggcacagtggctcacacctgtaatcccagcactttgggaggttgaggcaggcagatcacctgaggttaggagtttgagaccagcctggccaacatggtgaaaccctgtctctgctaaaaatagaaaaatttgctgggcatggtggcgggtgcctgtaattccagctacttgggaggatgaggtaggagaattgcctgaacctgggaggcagaggttgtggtgagccgagaccacgccattgcaccccagcctgggcaacaagagcaacggtaaactccatctcaaaaaaaaaaaaaaaaaaagaaagaaaaaagaaataactcagccatacaaggctacccatttggtgagaactaataataagttagatagcaaggtaatagcaaaatgtgggtgcaaaattaaagcaagttatttctgaggagaatgtaggtctcatggaagattttcatgtggacaaatttagtaaattttttgcaggtagtttcctgacatatttaacatttgtgatatagtaaacaataagaaggtactaaaggctgggcgcggtggctcacgcctgtaatcccagcactttgggaggccgaggtgggcggatcacaaggtcaggagatcaagaccatcctggctaacacggtgaaaccccgtctctactaaaaatataaaaagttagctgggcgtggtggcgggtgcctgtagtcccagctactcgggaggctgaggcaggagaatggcgtgaacccgggaggcggaacttgcagtgagccaagatcaagccactgcactccagcctgggcaacagagcgagactccatctcaaaaataataataataataataaggtactaatatgatccagactagaagagaatagcactaaaatgggagatggggtaaacctgtggttttttttaccttaggcttttgacttccaaaattattgtttttgctgggtgcggtgggtcactcctgtaatcccagcactttgggaggccaaggtgggaggattgcttgagcctaggagtttgagaccattctaggcaacaaagcaagaacctgtctctaaaaaaatttaaaaattagccagaaatggtggcacatgtctgtagtcccagctacttgggaggctgaggcaagaggattgcttgagccttttgaagttgaggcttcagtgagccatgatcaccccactgcactccagcttgggcaacagagcaagaccccatctcaaaaaataaaacaaaatagactgggcacgatggctcacgcctgtaatcccaccactttgggaggctgaggtggatggatcatgaggtaaagagatcgagaccatcctggccaacatggtgaaaccccgtttctactaaaaatataaaacttagctgggcgtggtggtgcacacctgtagtctcagctactcgggaggctgaggcaggagaatcgcttgaacccgggaggtggaggttgcagtgagccaagattgtgccactgcactccagcctggcgacagagtgagactctgtctctaaataaataaataaataaaacaaaataagtaaaataaaataaatgtttgtagttccaaaatattttgatgacataatttcttcttgttctaataaaactacatatgcattggtcctatgacctagtaatcacactattaggaatttatcataaatacacacctcaaaaattacaaaaatacatatataccagcttatttattacagcgttatttgtaattgcaaaaacattgtagatagaatggaggtcacataaaacttattcttaagattcagaccgggtgcaatggctcacgcctgtaatctcggcactttgggaagccgaggcaggcagaccacccgaggtcaggagtttgagaccagcctggccagcatggtgaaaccccatctgtaccaaaaatacaaaaattagctggtcgtcgtggcacgcctgtaatcccagctactcgggatgctgaggcgcgagaactgtttgaaccccggaggcagagactgtagtgatctgagatcatgccactacattccagtctgagcaacagagcaagacttcgtctcaaaaaaaaagatcatagatcatcttatcaaatcaaagtatgcaaaatattcaagtaaacttcagataaatatgaaggctaaaccattcagcttcttcaccaaacccttgaatgtcccacctgtctaaatggagatacatgtttgtttgatttattggttaactgtttttattccatttttcctcaaatgatcccataatttgaccttaggaagctgttcaaatagacacattaggttgaatggaaagactactcgatgatatttaggattttaagaggattttatgtattttttccttgtgtgcaataatttaatagcatcttgaataggattttctgatattactaaccctctgggaataatattaggtaattagacagttagctaatattaaaatatgtatcaggtaatatttattgagagtttcctctgtgccaagcaggatcaacttcataggcaggcgacctgtgcggggacacagggcttcatgcttagataggcccccttgctttgaaggcccctaccctttggttagggctctgctgttaccatcttgaaattcttaataatttttattttatttttttgagtcagggtcttgctctgtcgccctggctggagtgcagtggactcactacagtcttgaattcctgggctcaagcaatcctcccacttcagccttctgagtagttaggacgacaaacacacgccaccatgctcagataagttttttgtttgtttgtttttttgtttttgtttttgttttttgtagagatgggactgtccctatgttgctcaggctggtctcaaattcctggcctcaagtgatcctcccacctcagcctcccaaagtgctgggactacaggcatgagccactgtgcctggtcaatcatttttattaacaagcccaagccctcttttttttttttttttttttgagacagggtctccctctgttgtccaggctagagtgcagtggtgcgatcttaccttcactgcaacctctgcctcctgggttcaagtgattctcctggctcagcctccctagtagctggaattacaggcacccacccccatgcctggcaatttttttgtatttttagtagagatggggtttcaccatgttggcaaggctggtctcaaactcctgacctcaagtgatccacccaactcggcctcccaaagtgctgggattacaggtatgatccactgcgcccggcctccaagccccctatttttattttgcactgaccctacaagttacgtagctaggcttagttatgtttttagcaaggaaagtgtataatctcatgtaccttttgaaagattactcaggtctctgcatgtgaaatggaatttagggaatgcaagagagggagtaaaaataacagcgaggaagctatgatagcatttaaggttgctttgactcaggggtagcagtagatagggtaagtaattgatagtttcaaaatatattttgggagtagtaagcattggtatggattagtaatatactggatgtggggatgcagaaaaaaatattaaaaattacttctgaaattctggctggaatagaagtgccacttaccaggtaaggaaggttggagacataacatatttgagggtgtggtcaaaagatgagtttgacattatgctatgtcatataaaagacatataaaagactacctattttataattcctttttaataaaatattcagaaaaagcaaaactgtggttgcctgaggctgaagctaggaagattgactacagacaagcatgagggaaattttgggggtgatgagagttttctaaaactggattgtggggttggttgcattactgtataaatttattaaaaatccctgcatcgtataggggcactatattgtatgtagaaagctgtgaaaagattttaaaaatgattgacatgtctgtggttatatcaatgagtactattattattcccattttatacataaagaaaataaaagagaagttaaaaataaaagtttcatggttacatagctactaggtgtaatatccagtattggaatttgaatctttttgacactaagaccttactctcgatcatataatacattcactttctattttaaagttatattatagccgggcacagtggctcacacctgtaatcccagcactttgggaagccgaggcaggcagatcacgaggttgggagatcgagaccatcctggctaacacggtgaaaccccgtctccactaaaaatagaaaaaattagccaggcgtggtggcacgcacctgtatcccagctactagggaggctgaggcaggagaatcgcttgaacccagaaggcagagcttgcagtgagacgagatcgtgccactgcactccagcctgggtgacagagtgagacaccatctcaagaaaaaaaaaattatattataaatgctgcatctcattggtcagaagctctcttgaaattataaaacaaagaagaaaaaagataaagactgggaaattgtgttgaatcagtatataaatcctgtatactggtccttccatttcccctagaaataagtgatacaggccaggcgctgtggctcacacctgtaatcccagcactttgggaggcggaggctggcagatcacctgaggttgggagttcaagatcagcctgaccaacatggagaaacccccgtctctactaaaaatagaaaattagctgggcatggtggcacatgcctgtattcccagctactcgggaggctgaggcaggagaattgcttgaacccaagaggaggaggttgtggtgagccaagattatgccattgcactccagcctggggaacaagagtgaaactcaaaaaaaaaaaaaaaaagaaagaaaaagaaaaagaaagaaggaaggaaggaaggaaagaaagaaagaagtgatacaacaagttacagcatctttgtttattatccactgtgagttgtattaccacactttacttggctctttggcaaactatattatctcttcagatcactagggctaggaaggcccactggtaacttgaaggagtaaatgtatcttctaaaaaatgcttacttccagggagattggatccacacaagtgaatacatatatagtccttagtgtatgctatgattattttactatgtcagtagcataaagattgctatattaataagcattaagtgcctgctgtgctagacagtgaggatgcaagtggccaccaaaatagcatggtccctgccctcctggagcttctttttttcttcttcagtgggggaagcagatactttgcttatgcaaaaataattataaaatttaaagttgtgccaagttcaatggaaaaaatataaggtgttctgagagagcataacaaaggatcctggttttaactggggcctaatggaagacctctattaggaaataacatttaaactaagaccagacagacctgtagaaattagcaaagcaaagggagggaggaaaaagcagctttcctggcaaaggaacaatttgtgtgaaggccctgagacagggaagggctggggttctgaccaccctccaagtggtgcaatggaatatagtgagagagggagaagacatgagaacttggatactatgcaaaggatttggtattttaattcaagagcagtatgatgctactgaggagcagctggacaattgtgtgatccaattaaaattttaggaagatgaacctcgctattgtggagaatgcatacacaagggttctgttggttcatgaagaggtcttaagaaaactatgagctgggtgcagtagctcaggcctgtagtcccatctacttagaagtctgaggcgggaggatcccttgagcccaaggagctggaagttacagtgagctatgattattccactgtactccagcctggatgacagagcgagatcctgcctcagaaacaaaaaccaaaaaacaaacaacaacaaaaacaacaacaacgaaaatctcagaaaactacaggccttattatcaagaaaatgacaggccttattattgagaaaactacttacatttttaaaagctgattttcaaaaaccagattgtgaattaagtgatgctgaataggggaaaaaaagactgataaaccagtgtatctctgaataacccactagatcagtgcttgtcaaactttaatgtgttttcaaatcaccctgatgttttgttaaaatgtaagtcatgtctcagtaggtctagaggagggcatttctgcatttctaacaagctccccggtgatgcctagaccattggtcctcacactttgagtagcaagtgattgggctatactctttattctaaattctaaatgtattctatcttctaatgcctatcagccctcttgctggtctggctaattatcaaacttgagcatttaaaactgggggttttcagagattaattgaagtgttaaagacatggaaatataggtcacatatggcttttcatctcttccggaaatatcctatatatccttacttcttttctacctacctaacctatgtgcctaccccttcacttatgttcaaggttctattatacttcaaaaggactctatgcaatcaaagtgatgtccaagacaaatatacagaaatagtatgaggctctaacactttacatctaatggagtggtttgcatcattaattgaggcttactctgtgccaggcactttacctgccttcttcatttaataggataggagcaggaactcttagaggttcatttcttgttcaaggatatacatctcatctctggcttatatcacagtggactcttttattcactatcctaatcattataattttgtttggtgacaacaattctaaatgcagaaaagttaaggctctttattctgtgactaaaggctttgtattttctaaagatttgtggagctttgctgccattatttcaataattttataaagatcctaggtggtaaataggcctggctttttttctttttgaaatcttctccgtcttcttcttcattagcagtgcaacttcttgtggcatatggtacccaagatcttgggaaaaggattgatcaagtaaagggaaacgatagagagagtgtgctctacaactgagatcatgctccttgtgaaagacagggtagggaaatttcttattgctccctggttcttaagaaatgagagctaacaatgacatccagttttaaaagaaataaaatctgaattgtacttttaaattttataagccagagttaaaccaatagattgtaactcctgctaatttgatagtagctccagataatgaggaagtgacagggaatgctaatttcatttggtaagagataaaactgaaattattaatgtctccacggaaatgctaaatgcctccttacaagtagggtccggctaattgtctgtcttccaacaagccagatttgttggtgtttttccagacaatgttgtgtagttttcggtttggttcgatcccctttcttgtgatcaaagaaagtgattcaaatgtttaatgagtcttgatttggattggagacttgcagaacggctagcctcacagccccaaggctggctttccctaaggtaggtttcctatgcaccgatactggcaaggcgctttggctggaaactctggaaggaagccaaaggaaagtgaagttcctggcgctagcgcgtgtcctgctcagagagcccggcgctagctcattcttcgtgcagttattggctgggactctgtgtgccgctgtcggccaatgaagacgctggagatcgggcccctgcccgtcccctttctgcgccccgggatgaggcagagactgaacagccggcgagcaaatcaacggcatccagaaagccatgtcggactcggcgcccagcgcccaagcgctaacccgctgaaagtttctcagcgaaatctcagggacgatctggaccccgctgagaggaactgcttttgagtgagatggtcccagaggcctggaggagcggactggtaagcaccgggagggtagtgggagttttgcttctgcttggtgccttgaacaaggcttccacggtcattcactatgagatcccggaggaaagagagaagggtttcgctgtgggcaacgtggtcgcgaaccttggtttggatctcggtagcctctcagcccgcaggttccgggtggtgtctggagctagccgaagattctttgaggtgaaccgggagaccggagagatgtttgtgaacgaccgtctggatcgagaggagctgtgtgggacactgccctcttgcactgtaactctggagttggtagtggagaacccgctggagctgttcagcgtggaagtggtgatccaggacatcaacgacaacaatcctgctttccctacccaggaaatgaaattggagattagcgaggccgtggctccggggacgcgctttccgctcgagagcgcgcacgatcccgatgtgggaagcaactctttacaaacctatgagctgagccgaaatgaatactttgcgcttcgcgtgcagacgcgggaggacagcaccaagtacgcggagctggtgttggagcgcgccctggaccgagaacgggagcctagtctccagttagtgctgacggcgttggacggagggaccccagctctctccgccagcctgcctattcacatcaaggtgctggacgcgaatgacaatgcgcctgtcttcaaccagtccttgtaccgggcgcgcgtcctggaggatgcaccctccggcacgcgcgtggtacaagtccttgcaacggatctggatgaaggccccaacggtgaaattatttactccttcggcagccacaaccgcgccggcgtgcggcaactattcgccttagaccttgtaaccgggatgctgacaatcaagggtcggctggacttcgaggacaccaaactccatgagatttacatccaggccaaagacaagggcgccaatcccgaaggagcacattgcaaagtgttggtggaggttgtggatgtgaatgacaacgccccggagatcacagtcacctccgtgtacagcccagtacccgaggatgcccctctggggactgtcatcgctttgctcagtgtgactgacctggatgctggcgagaacgggctggtgacctgcgaagttccaccgggtctccctttcagccttacttcttccctcaagaattacttcactttgaaaaccagtgcagacctggatcgggagactgtgccagaatacaacctcagcatcaccgcccgagacgccggaaccccttccctctcagcccttacaatagtgcgtgttcaagtgtccgacatcaatgacaaccctccacaatcttctcaatcttcctacgacgtttacattgaagaaaacaacctccccggggctccaatactaaacctaagtgtctgggaccccgacgccccgcagaatgctcggctttctttctttctcttggagcaaggagctgaaaccgggctagtgggtcgctatttcacaataaatcgtgacaatggcatagtgtcatccttagtgcccctagactatgaggatcggcgggaatttgaattaacagctcatatcagcgatgggggcaccccggtcctagccaccaacatcagcgtgaacatatttgtcactgatcgcaatgacaatgccccccaggtcctatatcctcggccaggtgggagctcggtggagatgctgcctcgaggtacctcagctggccacctagtgtcacgggtggtaggctgggacgcggatgcagggcacaatgcctggctctcctacagtctcttgggatcccctaaccagagcctttttgccatagggctgcacactggtcaaatcagtactgcccgtccagtccaagacacagattcacccaggcagactctcacggtcttgatcaaagacaatggggagccttcgctctccaccactgctaccctcactgtgtcagtaaccgaggactctcctgaagcccgagccgagttcccctctggctctgccccccgggagcagaaaaaaaatctcaccttttatctacttctttctctaatcctggtttctgtggggtttgtggtcacagtgttcggagtaatcatattcaaagtttacaagtggaagcagtctagagacctataccgagccccggtgagctcactgtaccgaacaccagggccctccttgcacgcggacgccgtgcggggaggcctgatgtcgccgcacctttaccatcaggtgtatctcaccacggactcccgccgcagcgacccgctgctgaagaaacctggtgcagccagtccactggccagccgccagaacacgctgcggagctgtgatccggtgttctataggcaggtgttgggtgcagagagcgcccctcccggacaggtaaggtttagcaagtcatgcttgaccctgttagtgcttttttattcctacatcatattgaggaaggaatggagctgtttttttagtgatgaagatgttttcctggtgatgcattcacactttcaactggcccttcctagatcaaagttagtgcctttgtgagatggtggcctgccagagtgtggtttgtggtcccatttcagggggaagatacttgactcatctgtggacctaattcacatcctcagcactcttttgctatcacaactaaccaatcttgctaagggatggttaagctaaaacacaagatctcagcgatcagagtttagcttggtatcatttacattaggaataagctgctggatacctctaaccagtggcagcttctaggaatacaaaaactacctcattcctccacctttcaagtgattgtgacatttgtattaaaactaatagctttttgataattttcctttgtttatacagatcgtgtacctcattctcagataattttttatgaatgaaatgaaattccaggcatcctttaaattttatttcaagcattctactggaaatgatgtgcaccctgcttacaaaatatttttaccttataacagtaatgcatgtttgctagaaaattcagaaaatacagaaaagtatttaaaaaattaaaactataatctccaaacccaaagataaccatttttaattataaaagtaataatttatttcaaaaataaatctaggcaacccaagaaaacataaagtagccagactcagtggtgtgcacctgtagttcttgctgctcagtgcctgaggtgggaggattgcttgagcccaggagttctgggctgtggtgcactatgctgatcaattgatcaatccactgtctgcactaagttcagcatgaatacagtgacctcttgggagggcaggaccatcaggttgcctaaagaggggtgaactggcccaggttggaagtggagaaggtcaaaactgctgtgctatccagtagtgggatgacatctgtgaatagccactgcactccagcctaggcaatatagggaaaccatgtctctttaacaataacaacaacaacaacaacaatcccagaaactacaaaaggagagtctttttggtgcctccagtgttagtccctgtccttccagccttatttttcttaagtatatgcacaatgtgaaaggtagataaattcatatccttagacaggtaaagcattcattaattcagggtggtatgcaaggatactatccaaggcatggtatccatgcaaggtgactgcaaggcctttgccctggagagaaccctatacatactctcaactgtaggagaaacactgttattttgttactcagtgcatcattgctatcaactcttggatttggcagttagtcaaatgaggttctaccatttaccaactaggagtctgtggccaagttactcaatctcctttctaagcctcttcctcatatgcaaaaagggaataataagtgttttataagattcatgcatgatataatgtatgcaaagtgtttagcatggtgcctggcatatcataactgttaaacaattattagccagctcctagcattttgggaggctgaggcaggcggattgcttgaggccagcagttcaagaccagcctgagcgacatagtgagatcctgtctctacaaaaaaaaaaaaaaatgtgttttcattagctgggtgtgttggcatgcacctgtggtaccagctacttgggaggctgaagtgggagaattgcttgagcctgggaggttgaagctacagtcagctgtgattgcaccactacacttcaaccatggcaatagagtgagaccctgtctcaaaaaaaaaaattatcagctattactataattatttttattagttcctcactcacctaaaatctcaaacacaccttagaaatacacatatgagaacaaccaaaaatgacaaagtagaagcacatatgaaaaggctaagaaagcatgaaagccagcaagaaataactgccgctcttctggtcagcctggaaagcaactggcattttccctagaacaatgttttcaaacttggttgcacattaaaatcacctagagaccttttaaaaattctgaaacccaggccacaccccgacaaatgaaagcacagtctctgggggtgggacataggcatcattttttgaaggtccccacttgatcctaatgtgcagacaaatttgaaaaccacagctttgggaggctgaggtgggtggatcataagatcaggagtttgagaccagcctggccaatatggtgaaaccccgtctctactaaaaatgcaaacattagctgggcatggtggcgcatacctgtagtcccagctactctagaggctgaggcggaagcatcagtgagggagaatcagtgaacccaggatgtggaagtttcagtgagcccagatcacaccactgcactccagcctgggcgacagagcgagactccacctcaaaaacaaaaagaaagaaagaaaaaagaaaagcagtactctggaacctaccaatccatcatttagcatatttgtgaagtaaagtgttattctggtatttgcagaaccagaatccagctttattgggccaggcccaatttttttaaaaaacatggtaaggtctcccagccttaaagtattacatagcatagctctaaaagatcactgtaggaagacataaaatggtatttcagtcatctaagggaaaaaccttcctaaagcactagcccctggacaactattatttaaacatctacagctgttcaatagatattgggttctttttggagggatgtgacaaaattcttgtataattagattgtgatgatgattgtatcagtttagtacatgtaaatacactgaaaaccattggattatacactttaaatatgtgatttgcatggtatgtgaattatgtctcagtaaaaatctagagatggggctgggctcagtggctcacgcctgtaatcccagtacttagggaggctgaggccagcggatcacctgaggccaggagttcaagaccggcctggccaacatggtgaaacttcatctctactaataatacaaaaatcaggccgggcctggtggctcacgcctgtaatcccagcactttgggaggcggaggcgggcggatcacgaggtcaggagtccaagaccagcctggccaacatggtgaaaccccgtctctactaaaaatacaaaaattcaccaggcgtggtggctgaggcaggagaatcgcttgatggtggaggttgcagtgagccgagatcgcgccactgcactccagcctgggtgaaagagcgaaactccatctcaaaaaaaaaaaaaaaaaaaaaatcagccagatgtggtggcaggtgcctgtagtcacagctacttgggaggttgaagcaggagaatcgctttatctcaggaagcagaggttgcagtgagccaagatcatgctgttgcattccagcctgggcaacaagaacaaaactcactccatctcaaaaaaaaaaaaaaaatatctagagatgggagaatcatatggctggcataaaaaggtcaagtcaaagatatgtaagattaaggctttacgatgctccagttctagtaaaacagaccaggtacttgttttggtgtgaaattgccaatataagtatagtactgtacatattagttgtttagcttaggtaagtcttttaatctctttaaactccagtttcctcatctataaaataaagagaatatctactttgcaaacttgttgtgagagtgaaaagtaatgcatataaagtccctgtatggagcaagtactcaataactatttgttgaactaaaaatgataatactgatattcaccatttattagcatccctatgtgccagacactgtaaacaattaaaagttatcattctggtacccagagtacagtatgagacagacatgcaaaaaaaaaaaaaaaaaaagataatggagatctgcatagcataagatgcagtgggaccaaacgggaaaaaacacctaaatgagcctggagaaaggaagaaatgatagaggtggtgatgcttgagctatgatctaaaggttgagtagtagcttgtcagacagtaaaggggaaaggacagggcagggaggggccattgcaagaaattccatgcagagggattatggtatttcattatcactgaaccttaaactgtgtgtgtggccgggtacggtggctcatgcctgtaatcctagcactttgggaggccaaggtgggcagatcacttgaggtcaggagtttgaaaccagcctggccaacatggtgaaacctcatctctattaaaaatacaaaaaattagccaggtgtggttgtgggtgcctgtaattccagctacttgagcagctacttgagaggtcgaggcaggagaattgcttgaacccgggaggcagaggttgcaatgagctggtgtcaggccactgcactccagcatgggcaacagagagagactccatctcaaaaaaaaagtgtgcgtgtaaaacagacagtctttgtaggagatgaggtgaagcaagtaggcaggagttagatcctgagttacctttgggccaagccaaggagtttttattttattccatatagatgacagtcactgcagaaatttgaactgatatgcatatatcatgaggtttttttgttttagaaatattattctgtcagtcataagtgaagggactggggacattgggactggaggcaaagagatcttatctctttgcaatagtttgaaagctattgcaatatttgaagagaagattgataaatgcttgaaccagcacagtggcagtacagatggagggagctgactacaataaaatcatcaggacttgttgattgacatgatataggaagtgagggacagggatgagtcaaggctgatccccctagatcctgactaaggaagctgggtggttgacagtgccattcacagagacagtgaattctggcataaacacctaataggtcaggctggtttacacctccatcattcccatgggagaaggtatagaggggtgtgtgtttgtgtgtgtgtgtgtgtgtgtaaaagaacacagaaagccagattcctctttttgacaccagaatattggttcccaccatagtcaaaaggatattcctgaggatcgaggcttggaaaaatattggggaaggataagaactccagttgttgctgctttttttggcagccagtgtaacctaggtaaggacttggttgaattaagaaatttcatgtccagatcaggatggatttttctatttctctgagctctggtgtgtttcccactcagattgcaggtcgtaggtacctacggtgtgaattgtgttgtgtttctgtgcttgtgcaagggagtagctaggttgctgggaggtctggatgagggtgggggtggggtgagatcaagtctccagctccaagaggtcccctggggctaagtgaaaagcttgctcttttgaaatggtcttcgttggtaattaacaaaagatcaagaataccttggtgtcagataaagggaatttgtaggcacaatgctgttggtagctgatctcaatcattcaaggaagctattaaatctatgaacattagcattctgccaggtaaagagatctggtccttagcacctcccagacacactgattctttactgttttgaaacatctccctctcctggcttcctccaccccgcttccatactgtccttgaaatcaatgaatggtaatttagtgtatctagtgtatcactagcaaatgtctgaataagaaaggtttggtttccgctgtgtctcctgttacaatgagaacatgtactgcataaatttaattggctacgttaatgtgtaagccttttctgcaaagagatggatccgtttctgaatattctgcagaagggcagagttttgagtatatggcagtggttctaattagcagttgctccaatacaatcagactgagacggaagctactcatttagaatactggttgatgacaacactggcttgaacaaagtgaccactctccaatggctactctccctctcagtgggccgcaggttgctagggctcaggctgtggctgttttccccgccgaaaaggggcggggtcagtcggtgtgttaggaaaaaaaatgtatatatatatatatgttgtctgcctccccacagagataacaacccgtggaaaaacatgccgttgagcgggaggaaggcgaaaagataggctgggttttttggggggtgggggagcgtggaggatagggtgggctttttcccctccaatgctgcgacgcattaaccctgctgctgttgggacgttctctgctcagcctattggctgagcccgggagccgctgtctgccaatcgggtggtgaaaggcagacaaatctaccccgccaccagcaaaaacggcgcgtaacccttgcggcgccggccgaaccgcgccagagctggcgcggggaaagggagataggtgtctccagctgctgtggctgtttggggcgggtcggcttcatccgcgtctcaggagcaagtagagaattagcgggcggcagcaatgctccgcaaggtgagaagctggacagaaatctggcggtgggctacccttttgttcctcttttaccacctgggttacgtttgtgggcagatccgctacccggtcccagaggagtcacaggaagggacttttgtagggaatgtcgctcaagatttcctgctggatacggacagtctgtcagctcgcaggctgcaggtcgctggagaggtgaaccaaagacacttccgtgtggatttggacagcggagccctgctcatcaagaacccaatcgaccgagaggcactgtgtgggctcagtgccagctgcatcgtgcccctggagtttgtcaccgaaggtcctttggaaatgtaccgagcagaggtagagatcgtagatgtgaatgatcacgccccccgttttccgcggcagcagctggacttggaaattggggaggcagctcctccaggacagcgtttcccgttggaaaaggctcaggatgcagatgtggggagcaattcgattagcagctataggctgagctccaatgaacactttgcactggatgtgaagaagcgcagcgacggcagcctggtcccagagctgctcctggagaagcctttggatcgagagaagcaatcggactaccgcctggtgctgactgctgtcgatggagggaacccgccgagatctggcaccgcagagctccgggtatccgtgctggacgtaaacgacaacgccccagccttccagcaatccagctacaggattagtgtgttggagagcgcaccagcgggcatggtgctcatccagctcaatgcctcagacccggacctgggtcccagtggtaacgtcaccttttatttcagtggtcatacccctgatcgtgtaagaaacctctttagcctgcaccccactactggaaagcttactcttttggggcccctagactttgagagtgagaattactatgaatttgatgtgcgggctcgcgatgggggttctccagccatggagcaacattgcagccttcgagtggatctgctggacgtaaatgacaatgccccttacatcacagtgacctcagagcttggaaccctccccgagagtgcagaacctggcactgtggtggcacttatcagtgtgcaggatccagactcagggtcaaacggagatgtgagcctccgcattcctgaccacttgccatttgccctcaagtctgccttcaggaaccagttctccctggtgactgctggacccttggatcgagaggccaaatctagctatgacatcatggtcactgcttctgatgctgggaaccctcctctcagtacccacagaactattttcctcaatatttcagatgtgaatgataatccaccctctttctttcagaggtcacatgaggtgtttgttcctgagaacaatcgcccaggggacctgctttgctcccttgcagcctctgacccagactctggcttgaatgcgcttatctcctactcactcctggagcccaggaatcgagatgtatcagcttcctctttcatctctctgaacccccagacaggagctgttcatgctactcgatcctttgactatgagcaaacccagacactgcagtttgaggtgcaggcccgggatcggggcaacccaccccttagcagcactgtaacagttcgtctatttgtgctggacctcaatgacaatgctccagctgtgctccgtcctcgggcccggcctggttccttatgtccccaagcactgcctccatcagttggtgctggccacctaatcacaaaggtgactgctgtggacttggattcaggttacaatgcttgggtttcctatcagctcctggaggccccagatcccagcctgtttgcagtctctcgatatgctggggaggtgcggacggctgttcctatcccagctgacctcccaccacagaagctggtcattgtggtaaaggatagtggtagtccaccactctctacctctgttactctcttagtgtccttagaggaagacactcatccagttgtcccagatcttcgagaatcttcagctccaagggaaggagaatctcgtctaaccctctacttggctgtgtccctagtggcaatttgctttgtctcctttggctcattcgtggcactactctctaagtgtcttcgtggggcagcctgtggagtcacatgctttcctgctggcacctgtgcctgtctcaccagatctcgaaggagggaggggcttcccccttccaatgggatcctccgaatccagctagggtcagatgaccctatcaagtttgttgatgtgggaggccactctcatggctgtacacccttggcttctgcacccactcggagtgatagcttcatgatggtgaagtcacccagtgcacctatggcaggggagcctgttcgcccaagctgcccaccctctgatcttctctatgggctagaggtgagacctttgcaggctcaacaaatgcttgagggttattctgatccaggcatatggctaggccatgtcctagagagtactggcctctcagtaagtgcccatagtgatgtcaccatttttgtaagaggtaactatgtggtagacgctgtgctttgtaactgtttcgtgaattaaccagagttgtcacagtttagcattgggggcgggtcatgcctatatctgagtaagaaatgaaagtaattggtgatcaagagccaggctgttgtggaagcatgatgatggaatgtgggagcacaggaggctacagtgcacagggtacagtgcaccaggcagtcacttggacaaaggtggctgttttctctactcttcctgaaagaggggatcagattctgaagtaccttaactctaggttaccatttcccaagggattgaggggaaataaaatctttgtctcccagtatctagtacactgtgaagggacctctctatttgaaacatagagacagcagaaagaggagagaactaaaggaatagagaggcacgcatcagagtggtggcatagatcttttggtctgggtcttaggactcatatcaagtccctactggggatttgaactagatgcggtaaattggaaggttggggcgggttggtcatcacctttggaaaaaacagtaagtgaaatcacttatgtcagaaaactggtttacagttggctgattcatagaaacagccaccctgtgcatctttaagttgagttctcctgaatttggtgaaaccatgaaacctagaagccaagccatccatgcttggcctctgaccaccctcctgggtgacctgattcagccccagaaatgttcccctacccaaaaactgtaacactcattccacatttggggtctggggtgtcagaaaagctaagtcccatgtcagctgacattgagatttccgcaaagcattgctggagagtcagggcaagactttacaaggttcttactaatcttttctctcaccttagcagcattcagcaggatgggggagggtgggggaatacatgggctttgcctctcccagaaggacaagattttgctggttcaagcaaagtggtggaagcttctgaagtcatgcaggaagttgctgggacagaacgctgaggagttttgtatcactttgtcttccctgttgagtaccatctgagctgtcaaactttgctgccaagggggctgaatcaacctgcagcacgaagtgagtggggaggtaggaagcttctgtgacacagatttgcagcctgtgttcccaaggtttccaggattgaggaaactccataattggttgagagcacacagactttttggccaatcagactcagagctgaggtgggagatctgctcttccagcccgcctctcctcctccagctccccagctccactcaaattcagctcccctcccccctgcccacccccgccactcggtgactaagaactgctgcaagcaggcaaacctccgagcagtttttaagaggctggaaggagacataagagacttcagctgctgcattccaagccctgggtctaccttggagacaggacagcacagacttactctccacaaagggacttctgggtcatggggcccaagacactcccacagctcgctgggaaatggcaagtgctgtgcatgttgtccttgtgctgctggggctgggtgtctgggcagcttcgttactcagtggtggaggagtctgagccggggacgctggtggggaatgttgctcaggatctgggcttaaagatgacagatctgttgagccggcggctgcaattgggctctgaggagaatgggcgctatttttccctgagcttgatgagtggtgccctggcagtgaatcaaaagattgaccgagaaagcctatgtggagccagcaccagctgcctgctgccagtgcaggtggtgactgaacaccccctggagctaatccgtgtagaggtagagatcctggatctcaatgacaactctcctagctttgccacccctgagcgagagatgcgcatctcagaatcagcagcatctggggcacgattcccactggacagtgcccaggatccggatgtgggcaccaatactgtgagcttttacactctaagccccaacagccacttctctctgaatgtgaagaccctaaaagatgggaagccattcccagagctggtgctagagcagcagctggatcgtgaagcccaggcaagacatcagctggtgcttactgctgtggatggggggaccccagcccgctcagggaccacccttatctctgtcatcgtgctggacatcaatgataatgctccaaccttccaatcctcagttctacgtgtgggaatcccagagaatgcacccattggtactctgctgctccgcctcaatgccactgatccagacgagggcaccaacggccaactagactattcttttggagaccacacatctgaggcagtgcggaacctctttggcctagaccctagcagtggggcaatccatgtgttgggtcccatagactttgaggagtcacgtttctatgaaattcatgcaagagcccgtgaccagggacagcctgccatggagggccactgtgtgattcaagtggatgtgggggatgtcaatgacaatgccccagaggtgctattggcctctttggccaaccctgtcctagagagcacaccagtgggcacagtagtggggttgtttaatgtgcgagaccgggactcaggtagaaatggtgaagtgagccttgatatctctccggacctgccatttcagattaagccttctgagaaccactactcgctgctaaccagccagcctttggaccgggaggccacatcccactatatcatcgagctgctggccagcgatgctggttcaccttccctacacaaacatctcaccatcaggctcaacatttcagatgtcaatgacaatgcaccccgcttcaaccagcagctttacactgcttacatcctagaaaaccggcctccgggctcccttctttgcactgtggctgcctcagatccagacactggggataatgcccgcctcacctactccattgtaggaaatcaggttcagggagccccagcctcctcctttgtgtatgtcaacccagaggatggacggatctttgcccagcgtacctttgactatgaattgctgcagatgctgcagattgtggtgggggttcgagactccggctctcccccattgcatgccaacacatctctgcatgtgtttgtcctagacgagaatgataatgccccagctgtgctgcacccacggccagactgggaacactcagccccccagcgtctccctcgctctgctcctcctggctccttggtcaccaaggtgacagccgtggatgctgatgcaggccacaatgcgtggctctcctactcactgttgccacagtccacagccccaggactgttcctcgtgtctacacacactggtgaggtgcgcacagcccgggccttactggaggatgactctgacacccagcaggtggtggtcctggtgagggacaatggtgacccttcactctcctccacagccacagtgctgctggttctggaggatgaggaccctgaggaaatgcccaaatccagtgacttcctcatacaccctcctgagcgttcagaccttaccctttacctcattgtggctctagcgaccgtcagtctcttatccctagtcaccttcacctttctgtcagcgaagtgccttcagggaaacgcagacggggacgggggtggagggcagtgctgcaggcgccaggactcaccctccccggacttctataagcagtccagccccaacctgcaggtgagctcggacggcacgctcaagtacatggaggtgacgctgcggcccacagactcgcagagccactgctacaggacgtgcttttcaccggcctcggacggcagtgacttcacttttctaagacccctcagcgttcagcagcccacagctctggcgctggagcctgacgccatccggtcccgctctaatacgctgcgggagcggagccaggtgaggggctcggcgccgccccgggcgacccctgggggcggcactggagaagccgcccgtcctcataagggattgaacttgcatccactcctctccggccggcttggtcgctggctgcgctccacccgattctcgggatcattggaccgtttgcgcgaaaccagagtggccgattaagggatggggctccgagcaccgggggtggtggcgactgtgggcgaggggaggtgggaccgacccccacccctacactcaaaaaaggccggggcctccttcgagcttccggtgaatttcgggcgatttccgcgggtgtcgggggtcccgggaggaggcagtcacagatccacccctgcagccagcctcctaggcgccggctccggcacgcttcgccggtctgtagatttcctcttcgatttctccccagctcccagcatctgtgacttcactgttaccctccctatccccgcatcacccaaccgcacctgtctgcgggacttaggtgtgcgcgcggggctcatgcgtgtcctccctgctggccacccccacggcccacacaagttgcacgggctcgccacgccccgccaacacgtgcgcggacgcacgcacgcactcctcgcacgtgggcttacgcgaataccagctttcactgccactcgctcgcggccagattcacaggcctgttccggtccactcgcagctcccctctgccgctccctccgccgggctcaggagtactcgtagctgattgtgcgcgcctgagggtcccagatcgcggccgcccaggaccaggcgaggactccggagcctcctctcacctctcccacctgcgccccgggctgggccgggtcgcctggggggcggcctgagcgaggcgcggggccaggagcgctggagcgactgccgctctaagtgccgggcgggcaggactctacgatccttgggccagaggtccggatggtcccgggactccgtctcaagggtcggcgacccctcaacccagaagcctcgagcaggcggacaggcagagctgcccagtggccgaggcgcggcagggctccgcgttgggcgagtgagtgagcctctataggacagcaggactgggactccagtggcaccagcggccccttcctcccgcaggaagtgaaagcctcgagcgccctggctctcaacccccagagatacaggcttttggcgccgtcgtgatcacaatgtgcccagcgatctagggtcagagatttggaggtgaccaaactatctgacactctaacaagtcctgtctcctctggcagatggaaagctataggctctgccagatgccagggtgcccttatgtgtgaggaaactacaatagtaaaaaacacaagtttctccaactccaggagcttttattcaaaatatatcaatgcctaactctgctcctaggactgtattttgaaacacccccaggtgattttgatagctgattgagagaaacttactatataactcctttgagaacctcatctcatttgctcttcccaccattgctgttggctaggtactaacatgcctctcttataacagcttcacagaggtcaagtgacttgctcaagttcacagagcaagtaagagagattctaacccctgtctaactccagaatgtgtgcttttaatttcttggcacttggaactttaaaagcttgaggacaggagaggggagttgcctctgctgggattttgcttctgctgggatggggcaagggtggggttccttcccttttaggaccttacatgtggggaaagtcttctgtggctcctcatttctgagcagtccccgcagcgcaaacttggccagttatccttttggagattgagttcccccagctccgtttcctcctatcacaatcactgcatttccatgtagattctgctgtgtctaagaatacagtggctgagggctggccatccctgtgcccttctccatggcagccccagaatggtgctggtgactcccgatacacctggaatgctaggtttctgggttctgctcatatcactgccacctgtgagccttgagtgagccactggcagttccggagcttccttctccctggagtaatctgagatactcacactctctgcttctgggagcaagtatgagtattaattaccagcccaccccagaaccagtgaggaggtggctctaggagtgctccatgagagtgtgtgatgggataacacaccccctggaaagaccagaagggactcaggaatgaagtggctggccagagccccacaccttcagctaggtgggagatggctacacatcagccccttgggagccctggagacttagttggccctgcttggaggctgtgggagctggatccctccccgctgcatcccttccatttttctccgtctcagacagagcagccttgttctcttctccttagtcacagaccattgtctggcacggagttctaggggtgagaagtgtcccgggacttggatgccccgcaaaggcccaatctggcatgactcctaaattaataatgtatttagctgtgggaagagattcttgcaagccaagggcccagagaagatgtccctgtgaatgtgtcactgcacaacctggcaccaaaagggttaccaagaacagcagccatcttgctgcagaggatgctttgttcccagctgaggagttgaataaattcattctagggctggtagaattctcattgaaaagcctcctttgccactttagggggctttgtctgcacctcttcccccagttccacagaagatgccttcagtccttgaattttggctcaggagttctgactctgggggcagggaggaaggggccatttctttaggaaaggagtctcagcttgctcactgtggtcagatgaaatgtgatttatctcttggtttctggtacctcagacctctgagacctgaggtgtattttgtctttggagatgagtccacccctgccccctcttagtccgttttcttctctgtgcccactcccctccttctctcccggcccatccctaggggctcgggtgacattctaacttctcacgggtactcagcccctttccctctgttttctccacagcaagccccgcccaacacggactggcgtttctctcaggcccagagacccggcaccagcgggtaggtgactgattctccagcccaccctcttctctgcggcattttctcagggatgacgtgggaggagatgggggagggcccagcatttgctacagatggcttctccctcagtttgagatcccagggaggtcttggtgtgcggggggctggcacacagaccccggaaggaagaggcgactgccctgactgttcaggaagctcaattcacatgcttgccccttccctcctcgccacgaccggcaccttttcctatcccctgagggcactgtggaaccaaaggatggtcttaagctggtctctgggtgaaagcgaggctttctatgcccatgtactgcctaaccccctcccctgagttgagctgggctccattatgacctggggctcaggcagaaaagcatttgaccggaggaggcggtccgcactcagcgcctcctccagagcctccagagccgaggctgactgcagcctggggagagtggaggcagcacagctggaggtggaactgaggaaggactgggcggggcatggagcaggcccccttctccggcccctcctcccactgtcctctgcccctacttgtcctgctctctgtctgtggggtctccgtgtctctgcccctttttcttgagtttccgtctttgccactttctcttacctctcagtccttccctcagtctctatctcgctttgcaatctctgcctctccctctcttctccatctctgtcttagcttccgtcttgattgctgcacctcagcctcagtccctttcatttgtctacttgcattgatctgtgccgcccactgtgcctgccatggcataagtgctcaataaatgtggagtgagtaactacacgggacccttagtctctttctccttctctatctctgcctccctgtccttgtcctggacctcttttctgtttctcctttcaccgtttcctagcgccttgtgttcttctatccccagcctctatgtttctctgtctctcactatttctgctttcctctctgttctttgtctctctttgtctctgtctctgtatatctttctttgtctctgtctctggtctctgtgcctgttgtctttttctgcctctttctctgttactctttctttatctctctttttcttttatcttgtcttttttctctgagcctctgtctctgtctctcatttttttgtgcttgtgggcaagccagcacacacaaccccccacccaccacccaccaacaccccgctctcttccttccctgcccctcacacactgagcctttgatcgcagctctccaccagacaccctcccatccaagcagccccagctgctcatttcaatctggtatgaattcctgctgagacaggaaccccctgcgggctgaaggggagggaaacttcagcagaaagaccttcagttggtctgagcagagtgggataggctctgcgccaggcctcccagttagaagtcaggagcctggaggagtctcagagcccagggagagaagcaggagcttgggccaccttaccctacctcctcaatggttgagtacttgctgtccacatttgccaagttgctacagatgctgagcttccaagagttatctttcccccatcctgcaaccaaccaaacccttgttgccacaaggacccaggagcccttggtgtatggcagagattccagcttctgggcatgcacagtcctgtcacccattttaggaacgcaaagcgcttcttagaaggcccctaaaaagcagcagatcaaaaggcttgggctgcccttgcccttcctttgaccccagctgttgtccttctccctgctggccttgccaaccttctcataagttatccattaagtcattaatgtattcattcgttcatttattcaacaaatatttatcgagcatctactatgagcagggccctgtgctaaacattgggctataggagtgaacaagtagatgtgatcccagaactcataggcttccagaccagcagaggagactgaaaatttgcaacaagtaacacttaaaaaaaaaaaaaaaggctgggcactgtggttcacgcctgtaatcccagcactttgggaggccaaggtgggtagatcacttgaggtcaggggtttgagaccagcctggcagccaacatggtgaaaccccatctcgattaaaaatacaaaaattagccaggcgtggtggcaggcacctgtaatcccagcgacttaggaggctgaggcagaactgcttgaacccggaaggcagaggttgcagtgagctgagatcacgaaaaaaaaataatctagccacaaatcacagtaagttctgagaggcagagaacaatgtgagtgtaatgggggggggaagatcagagaaggcttctaggaggaggtgacattgagaagttctaggccatttatgttccctctacctaccaccaccccaggccatacactggctttgaagcagaattcaccattgaacctggaagccccaccaactgcctctcatgtgtcctctggggtgagcaccttacccctgcctcaactcccattccatcaaatgagaggcttagtggcctggaatacatgtgggagctcttggagatatggaggagaaggtgcggaacctctctctctctcctctctctgcttccttagttaacttgtggaggatgcaacaaaccttttttttttttttttttagacagagtcttgctctgttgcccaagctggagtgcagtggtgcgatcttggctcactgcaacctctgcctgccaggttcaagcgattctcctgcctcagcctcccgagtagctgggacagcaggtgtgcaccaccacacccagctcatttttgtatttttagtagagatgggtttcgccacgttggccaggctggtttcaaactccccgacctcaactgatccacctgcttcagcttcccaaagtgctagaattacaggtgtgatcgcccccggccacaacaaacatttttgattcagcggctccaaagtgaaataagcgttaggatctagtccagtaacttcaacttctctccttcattcattcaacaaatggtcagtgagcactttctgttggccaggcagtgttctcgatgtgggaggcccctgccctcaaggagtttacagtgcactgaaggagacaaatattgaccaaataattacaaaaataaatgtgagactgaaactgtcataagtgctaggtagaattgtatctggtggtgtgggcgtataatagggatttgatttagggagcaggaggacatcctggaaatgaagttgtgctgagatctgaaagacaaatacaaattaaccagctaaagaaaagaaggaagagcattccagatggtcaggcataccagcttcaaagcagggctggtgttgagttcttcagtaaacttggttcaagatcaagccagctctgggtcacactgcctacacagaaggaagagcattccaaatgggaaaagcctatgcaaaagccttgtggtgaggcctcctgggatcaagggaatggcagggagttttctctttgctggcactggagtgaggggatgaagaggagaggttccttttatccagtctaaccctggttccagccttctgttgatgccctgcctcactccctccccaccatcttgcccactgccctccagcctggtctggtcagacacaccagcttcaaagcagggctagtattgagttcttcagtaaacttggttcaagttcaagtcagcactgggtcacactgcctagacagaaggaagaagacctggccaggtgtggtggctcacgcctgtaatcccagcactttgggaggctgaggtgggtggatcacctgaggtcaggagtttgagaccagcctggccaacatgatgaaaccccatctctagtaaaaatacaaaatattagccaggtgtggtggtgcacacctgtagtcccagctactcaggaggctgaggcaggggaatcgcttgaacccaggaggcggaggttgcagtgagctgagatcacaccactgcactccagtctgggtgacagagcgagactccatcaggaaagaaagaaagaaaaagagagagagggagggagggagggaaggaaggaaggaaggaaggaaggaaggaaggaaggaaggaaggaaggaaggaagaaaagaaagaaaaagggagaaaaaatgaagaagacttacattctgaagttcctgcttggcacatgcttctcctccccaccactatcccttctcaggtcatcctttgggtgtctgatcccaatagctgttgtctcaagctctgagcccagcaaaccatttcccccttcttaggctgtaacccaggccctgccctgcagctgtccccagcctctgcacaaagagtctccatttggtccctagactgttctctgatggctccacactaccatccctcctctgagagacagtatccctgctctctctcagtttgggcagtcattcaacaaacaaatagcaacttaatttttttccacttataaaatagtacatgctcattatagaaacatgaaaaatagaaaaaaaattaaaaggaaaaccacccatcattttacaatctagggagaaccaccaccaactacagtttaatatgaaacatttcaaatatgtacaaaagtagagagaatggtgtcatgaacctgtatgataccactatccagcttcaactaatgccttatcttgtttcacctatatccctacccttatcctgtccttggattcttttgaagcaaatctcagacatcatataatttcatcttggtctccaccatctttaacagatgacttttttttttttttttttttttggagacagagtctcactctcttgcccaggctgtggcacaatctcagctcactgcagccttcgcctcccgggttcaagcaattctcatgcttcagcctcctaagtagctaggattacaggtgtgcaccaccacacacagctaatattttgtattttcagtacaaacagggtttcgccatgttggccaggctggtcttgaactcctggcctcaagtgatccaccctcctcggcctcccaaaatgttgggattacaggtgtgagccaccttgcccggccagatgattctttcataaggtccacattttatatttgagtgagtgtctcttaagtatcttaatgctcttttaatgtaaaagacttcccctccatcttccatttttgcaatttatttgttgaatccctgccttttcatatatatctttctaaacttttctttgtgtaatcaaagaacatgcatgagcttcatttttatttttatttatttatttatttatttatttatttatttatttattgatacgtagccttgctctgtcacccaggctggactgcagtggcgcaatctcggctcactgcaagctccgcctcccaggttcacgccatgctcctgcctcagcctccagaatagctgggactacaggcgcccactaccacgcccggctaattattttgtatttttagtagagacggggtttcaccgtgttagccaggatggtctcgatctcctgacctcgtgatccgcccgcctcggcctcccaaagtgctgggattacaggcgtgagccaccgcgcctggccgagcttcattttaaaaaaatctcattcacctaaataagttgttcacaaacttgtcacactttcatgtgacactttattcacatattaagaactgttattcccagtcatacggtacatttcctactagttttttaaaaatagcaactgaggccatactgtccaacagaattatagcttttttcttctttgcagtgtatcatgagaatttccccatgtctttcaaaattcttcccaagtcatttgcagagtaactcctcttatgaatatacatattattttacagaataagtcctcatatgaatatacatattatttttctaatgctaatgggcttttgctacattagaaaacatacacattcatttacaattttttttttttgagacagtctcgctctgtctccaggctggggtgcagtggcgccatctcggctcactgcaagctccacctcctgggttcaagcaattctcctgcctcagcctcctgagtagctgggactacaggcacgcgccaccacgcccagctaatttttgtatttttagtagagacggggtttcaccatgttgaccaggatggtctcaatctcttgacctcgtgatccgcctgcctcagcctccctaagtgctgggattacaggtgggagccaccatccccagcctcatttacattttaacacaattaaattcagggtgttgtcagggtgacttcctagatttctcagttttttgagcatgatgtagggagtattttattatagtccagtctatgggatattcccttatacacacacacacacacacacacacacacacacacacacacacaccccaaactcaatagggcaagaaccatattcatcatctcttaaatcctaggtcctgtcacaggccactgcttggaaaatagttgactaaatgtagtccatttcttccatttttacttttcactattccccaaatcctggaagagtccctcatatctgctgctggggctccaaggcctccaagctgaagcccagtacgttgttgtgcataagatcataggccctggaatcatattaggctggctttcaggttgcaactctaccagttccagctgtgtgactctggtatagtctctcaacctctctgagccctgttttcatctgttggaaaatatagataatcacaacacttatctgcagggtgattccgaggataaaaaagacaaatatattacccagtcagcttagaataggaagctctcagtaaatggttaaaaaagaggtctctctccctctgctcatctcttacccagcttcacataattggcagcccacccacctgtttggccctcaaccttcaaccatttcccaggacgcctccttacactcctgatcatcatggttccaaccccactgttccactcagctttgttccctcaacaccactgctccctgtgacaggtcatcctcctaacctctggcatctggtcccgttgtctccctgacaacccgcatgctctcctccctgcaacccccgccgcttgcctgctctccctactttattcccattagcccccttcacctggggctgagaacacctggccttgaccctgcaccctcagccaggcccacagagctcagtcgggccggaagtaaggaccccagatattcagttgaggaatttaacattaatacaataatatagaatccaccagcagattttcataaatgttctgtgtgttcttttatccttttttttaatccaggattttatcaaggagcatagattgcatttggttgtcacgtctttcctctcctttaatctggagccagctcccagtctttttatttttttaatgacatggatatttttaaagagtccaggccagttgtactttaaaatgtccccgaacctggatttgctggctattctctgatggttagattcagattacacaccttggtaggaatacttcccgcagcatcacactgggactcatctaacgtcggcctgtcccactatcagtgatgccgagtttgttcgtgtggtaaaaacagtgtcccagatctctccattataaaaatatatttttataaagatattttaaaatatttgtgaaaatataagtaatctgtggatgatactttgagataggcagcaacccttcatgcaattttagtattccctgatgatccttgcctgtatctgtttttacatcagtgattacaaagcggtgatgttctgtcattccttctacatgtatttgctggtattcttctgaaaattacctggatgatttcttcagatttaaattcactgtcttttccttggggaagcctggactggctgagctgcctaaccctgactctctgtcttttttttttttttgacagggagtctagctctgttgccaggctggagtgcagtggcaaccttcacctcctgggttcaagcgattctcctgcctcagcctcccaagtagctgggattacaggcgtgtgccaccatgcccggttaattttttttttttaatatctattttagttgagacagggtttcaccatgttggtcagaatggtctcgatctcctgacctcgtggtctgcccgcccctgcctctcttcataccctctggtagcccctgacacagcccatggcaagtatcacaattgcaattactctattgtgtaattatttaaaatcagcctctcagtgcccaccatgagcaccgtaaagatggacagtttctatcatactcacagccacaaccccagcacctggctctgtgtctggtacatagaaattgctcaagaaagaattgttggaggggcgcggtggctcacgcctgtaattccagcactttgggaagcggaggcaggtggatcatgaggtcaggagttcgaaaccaacctggccaatatggtgaaaccccatctctactaaaaatacaaaaattcgctgggcatggtggcatgtgtgcacttgtcgtcccagctgctcaagaggctgaggcaggagaatcacttgaacctgggaggcagaggttgcagtgagccgagatcgcgccactgtactccagcctgggtgacagagcgagactccagctcaaaaaaaaaaaaaaaagaaaaaagaaaagaaataattattgaatcaatggaaacagaattacaactcttcccacttttgggaaggagaattgagattcctgctttccccttcaaccctagctttatgtttgttgtgatggtatagaggtcacacatggcagccttgtgtctgttcttaggctgagttcatctacttagggacggggaatcccagattgggcaaaaccaaaagcagggacagaccttggaaaaattgtaaagcagttcttggttgtgctcacccaccatgacaaaatatgcacacacacaacgcaacacacacacagacattttcatgccttcaaggcctaccctacagcctttcccatggtgccaaacccttcttcttaccttacagtcacttaactgtctctgctggtctcttcccactcatttaggcaacaaatatttattgaaaaacttctctgagccagatggtgccaaacagttacctaaagggcagactgtgtgtgtgccagggctgtttcccgccaacactcccctgcaaattgaaataatttcatccttggaaattcaaaaaaatcatgaaaattgtcactgtgggaaaattccaagtagagctgaaccttctaagaagcagagagttcttcttatggtttagtatttttttaaattatgaatcatttcatgttttttcaacactcggagtttctaaaagtctcacttaggtccaagtgctaggctttgtgctaggtgcttcagtaggaagcaggtggagtcgctgcctcacagaagccagtgtggtggaggaacagacaggcactacaacagctgcagtgtgactagtgccatgtggggcagccgctgggatgggagtacagtggaggcacctgcccagtctgagtggatctcctctgatatattttattcgtgtcatcatggcaaatgttgggggactggcattctagggaacaccatctgcccaggattcacagcaagagggaacttgagggataggaaagtgcaccttggaaaaggtttgatgatagagtgtttgagggcggggggtgggggttcttgtaaaataggaggggcaggttcttctatggccgtggattttactctgagggcttaggaagccattgaattttagaaatttcttctccctgctccagggtctcttggggcctcctacatctccccctaggtacctcctaggtccccactttttctctagctctggaacattctcttccatttcccaccttcacagtcctctggagaaggtctgatctccctcactatgacaggaagccaggctctctcatggtgggtgggggaatgcactatgttcaatgcattggaccagcctggccaacatggtgaaaccccgtctgtactaaaaatacaaaaattagcctggcacagtggcaggtgcctgtcatcccagctacttgggagactgaggcaggagaatcgcttgaacccaggaggtggatgttgcaatgagccaagatcgcgccactgcactccagcctggatgacagagtaagaccctgtctaaaacaaaaagaaaaaagcatcggaggcagcaaagagctggtttgagggactgacttgtgggattctggcttctgaaggattgtagaagtgcctcctaccttgctgagagaaacaggtcttgggcatggggtagggttagggtactaggtttgggagccctgggagaggacaggaggggcatgagctgtgccggcctgggagtctgtgctcaccatcctactctctccccagctcccaaaatggcgatgacaccggcacctggcccaacaaccagtttgacacagagatgctgcaagccatgatcttggcgtccgccagtggtaagtggtgtcagtgtgtgtatggaagagtgggagacctggggttctggggtgcatctcacagccaccatgcccacggactggatgtcaaacctgtgtagtttctccagatctttcggcaggtctgaaaggacccacaattccaaacataaagcctggaattgtggctaaggaacagcagaggggttgggggtcctgggatgcctggaggagagcgaacaaggaaaagactcatggagggaatagtggttacaagtctagctctggaatgggacagtgtagctcaggtcctagctctgctactatccttgggacttggatcgacttgctcaatctctctaaacctcagtttcctcagcctagaaagtggggacagggaccccaaagggttgttgtagagattaaatgagatgataccacaaagcatagagttctgggcctggcgcttggaagccctcaagcaatgaaagtgggtgtagaaatccccagccgagagaacacctcctctttatgcgaggctcctcttttgctgcccctaactccagagtaggattctggttttcccataaggttgactaagggcttcctttgtaatagagattcggctagtggtggttgtccctgaagagtcactagggcccagagcaggagaagaagaatatcatttgtccttaagagcacagcctaagctgggcgtggtggctcacgcctgtaatcccagcactttgggaagctgaggcaggaggatcatgaggtcaggagttcgaaaccggcctggccaacatagtgaaaccctgtctctactaaaaatacaaaaattagctgggcatggtggtgcgtgcctgtagtcccagctacttgggaggctgaggcaggagaatcgcttgaacctgggaggtggctgtggtgagcagaaaatcgcaccactgcactccagcctgggcaacagtctcgctctgtctcaaaaaaaaaaaaaaaaaaaaagagcacaggctttagaggcaggccaatctggattcaaatcctggcacctggcaccaccacttagcaatgagtccttaggtaagttattaaaccccctcggtttcacttactattaatgggcacagtattaacggatctcattgtggtgttaccagggccaaatgcaagtccctcagcacaggattggcagagagtaagggcacaatatattattatctttgctgacccaaacccgttttttactgggtagaaagcagaattagaataatgcctattaataaagactagcttctggagcagcaaatcctgggcttataaggaggctggcagaggatcaaggcattgccctatatcatgaactgatagccctgccctccagcatgtctggaggactggtgggtagagaaccaggtgaaatcacaagaagcactgtcatcacacctgggcacatactaaacaaactttaggggcctcctgtcaatgaatcctctcaatagctctgcaaggcaggtctgatttctcacactcgacagatgagagaaccgagaaggcacttgccccagggtcctcagttttgagctgccaagctgaggttctaacctggctcaactcctaagtttatgctctttctactatagggaccatggctgcctttggatccagcctcggcttctctattacctgagcaggatgagaggctgtcctcttcctcgagctctgctttattcttccagatcagggttgccagataaaatacaggatgcccagttacagttgaatgtcagataaacagcaagtactatttcagcataagtcagtctcaaatgttgcatgagacataatgtactaaaaaaaaaaatgctcattgtttacctgaaattcaaatttaactgggagccctgtacttttatttactaaatctggcaactctaccccagatgtctgtgaggttaagtggggccaggcctacagctgacggaaggacagagagagaggtggcagggactgctggcctcctgaggcagagctgtcccaggtctggtggggctatgattccagagaggccagagactgagtatgaaagtggcaggcggctgggtctgaggagatgccaagttggcctcttgagggaaataaacaggtatatttagctgttgtggccttgcgccctgaggccaggaagcagctttttagcctaaatccagatgttaaaaacagaaatgaaatcagtatttatggccccaaaccctccaagcaagtcatgcagctcgttcccctgtcaaggcctcccacctttggcccacacagggcctgaccctcgtctaagcctgcgccctggggaacggaccctgggggtggaggtggtgggtcaggccctgctctcactttcacacccgcttcctagccctgaaaccagagaggttcctgaagtccagcccagccaggcctgtggggctgctgagaggggttaagtaagagggagagtaaaaaccgacacttgggaggaggcttttaaaataaacatctgcggggagggatgctctcaaggaggctgcggtttgcagctcagccagctgtgttccagctaatcagcctccttgggctactctggagttgctgccttggccctgggatggggtaggttaagaggacagagggaggtcagggagctgggggctgagtttccctgagtagaggctggcacaggagagaaggcatcacccccacctcgtccaggccagaagatgtccagcttcttgaggctctcctaagtctgcctctcctgggaccaagagaaaatcccggtccttgaccaaggtgggccttggggggagtggggtgtagagggaggggcactggagaactgactctacagaaagtcaaagctggcaatccaacttcttcccctcagatttatagatgggaaaacaggcttgagccacgcagagacttgaccaagctcacacagttccttagtggcagagcagagcaaatattctctttcttttacattctggatttccatatcttctctccctcctggtccagcccaacctcagggcaccccccacgaggtgggcgggggatggctttgtcacttgcacccactcggggtgctactcagagatcttgggtgcacataggacgtgggtgggccgagcttctagctactccgtcaggcccttcctgtcattctgtctctgcctcccttctccctgcttctccgtgttcctcctcattcttttctgtgtgcagggagactacaccccccaccccgctctttctctggcgcctctgaggtcccccctctagcccctaaatcactctggaatcctggctctttgaagccagatctgggcccccctcccctaccccttccattcccaggctgggaaaggctgaagaggctgacggctggaggggagggggcggggcggtggcggatctggcttccttttggagttaattagggaaaacagagaaatgtcagcggaatgaaagggctgggggtgggggccagctggggtaggagaggaggaagtgggcagctgctccctcccactcaacccctctcccccgcccccagaaagctctcagctccggggatttgcgacatgaaatgggggctgtagaaacctgagcgctggtgcgtgaagagaaaaaccgaggcgcatcccggctctcccctcccgtgtgccctcctcctcttatgccggcttgaaaatatttcctgtctctctatttctcaatccctggttgatgtcccaggattactcagcctctccggctttagtcactctcgctacccgctcccagggtccagggtggaggcagagggaggctgggagagaagctctactgccagctgggcctgggctggcctgggcatccctgaggttttaactgtctcctaaccacagaggatctcagggcctccagcagcgagccccaatgagtcaaactcttgtttcctcctctcccacccccgacccagtcagggcaggtgaggggtagaggtgatggcatgctggatgtgacggtgttgatgatgtattgcacaggatgaagcaccatctcatttagtcctcacagcagccttcacagtgcgtacaaatcagctggcaattccgagaggctgcattctaaacaagttcctgggtgatgctgagccagggccagagtgtggacttctctgggccccagtttcttcttctgtacagtgggacgttggactggaggtgctgtctgatgtcacctagctgtggcactctgagcctgtgcctaaagtgtccctgagatgtctagtccccgagatcatcatctcctcagcttcatagagccgagctcttctccatcttctctctacctcccattcactcagaacagggataaggtccaagctgctggtggtgatggtgactgactgtcccttccagcatgcgcttaggtacacttgggcctgaatgcccctctaacaaatgctaccgggtatggccttggtccttctaacacttggttccctcatctgtaaaatgagggtcataccacatagctggctgggctgttatgtagaggttaaaagtgattgtgcatgtgaagcatccagcagagtgcctggcacacagtaggtgctcaaatgctgttttgaaatacaaaaattagctgggctagtggtgtgcacctgtaatctcagctactcaggaggttgaggcaggagaatcacttgagcccaggaggcagaggttgcagtgagccgggatcgcgccactgcactccaggctgggcgacagagcaggactccatcttaaaaaaaaaaaaaaaaaaatgctgttttgaaatggaggcttggaagagcactcttcacccccaccccacacacttactaacggaactaccgaatctctactcgtgccaggccttgcttggcaaaggctaggggcatgtaaagccatggtttcatggctgctgccctccaggagcccatggtctagtgtgggagtcagaggctcccttgagaaagccagggcaaggaactgagagcccgtgtcacagccctgagagaaataccagcgaatgtgttttgagcacttacatctaccaggcactattttacgtacctgacatacattttcttatttagcattcactaaaaccagaagaggtggttaccattatcatccccattttgcagatgagaaaactgaagtggcataaggaggttaggtagacttgcccaggatcacagtgagtaaggaaaggagctaggaatcaaacctagactttctcactccagagcctcttaacctctaccctcaactcttgtgaagagagactaccttggtgacccctatattcccagtgctcagcgtggtcaaggcccagggtgctgtataggcattcattaactgctggggatataagacagtgactgttgaggaccctaagtttagctcccacctgatcttcctctgtctctgcagaagctgctgatgggagctccaccctgggagggggtgccggcaccatgggattgagcgcccgctacggaccccagttcaccctgcagcacgtgcccgactaccgccagaatgtctacatcccaggcagcaatgccacactgaccaacgcagctggcaagcgggatggcaaggccccagcaggtggcaatggcaacaagaagaagtcgggcaagaaggagaagaagtaacatggaggccaggccaagagccacagggcggcctctccccaaccagcccagcttctccttacctgcacccaggcctcagagtttcagggctaacccccagaatactggtaggggccaaggccatgctccccttgggaaacagaaacaagtgcccagtcagcacctaccccttcccccccagggggttgaatatgcaaaagcagttccgctgggaacccccatccaatcaactgctgtacccatgggggtagtggggttactgtagacaccaagaaccatttgccacaccccgtttagttacagctgaactcctccatcttccaaatcaatcaggcccatccatcccatgcctccctcctccccaccccactccaacagttcctctttcccgagtaaggtggttggggtgttgaagtaccaagtaacctacaagcctcctagttctgaaaagttggaagggcatcatgacctcttggcctctcctttgattctcaatcttcccccaaagcatggtttggtgccagccccttcacctccttccagagcccaagatcaatgctcaagttttggaggacatgatcaccatccccatggtactgatgcttgctggatttagggagggcattttgctaccaagcctcttcccaacgccctggggaccagtcttctgttttgtttttcattgtttgacgtttccactgcatgccttgacttcccccacctcctcctcaaacaagagactccactgcatgttccaagacagtatggggtggtaagataaggaagggaagtgtgtggatgtggatggtgggggcatggacaaagcttgacacatcaagttatcaaggccttggaggaggctctgtatgtcctcaggggactgacaacatcctccagattccagccataaaccaataactaggctggacccttcccactacataatagggctcagcccaggcagccagctttgggctgagctaacaggaccaatggattaaactggcatttcagtccaaggaagctcgaagcaggtttaggaccaggtccccttgagaggtcagaggggcctctgtgggtgctgggtactccagaggtgccactggtggaagggtcagcggagccccagcaggaagggtgggccagccaggccattcttagtccctgggttggggaggcagggagctagggcagggaccaaatgaacagaaagtctcagcccaggatggggcttcttcaacagggcccctgccctcctgaagcctcagtccttcaccttgccaggtgccgtttctcttccgtgaaggccactgcccaggtccccagtgcgccccctagtggccatagcctggttaaagttccccagtgcctccttgtgcatagaccttcttctcccacccccttctgcccctgggtccccggccatccagcggggctgccagagaaccccagacctgcccttacagtagtgtagcgccccctccctctttcggctggtgtagaatagccagtagtgtagtgcggtgtgcttttacgtgatggcgggtgggcagcgggcggcgggctccgcgcagccgtctgtccttgatctgcccgcggcggcccgtgttgtgttttgtgctgtgtccacgcgctaaggcgaccccctcccccgtactgacttctcctataagcgcttctcttcgcatagtcacgtagctcccaccccaccctcttcctgtgtctcacgcaagttttatactctaatatttatatggctttttttcttcgacaaaaaaataataaaacgtttcttctgaaaagctgaacgtttctgtataagcgatggaagctcctggcatgtgtgcatgaagtgatgagctgaggtgggtgctggaagaagggcggaatcgggaggccactttgtgtcattgcgcgtctagatgtttccgaattgcgtgtgtgtgtgtgactgtgcaatatggttgtgtatgcttgcaatgccgttgtgcctatgagacagtgtgcgattgtgtgcctatggatctgtgtaccgtgtgccattgtgtgatcggtccgctgtgggggtggggatctgagtgcggcgtgtcagtgtgcagtggagtgtgcagtctaagcttgcggctgtctccaggcagaagaggagaccccggcgcgggcgggggcgggttggcgccgggcaaacgccttgggtagaggggagaggacgtttcgttagttcccgccccttcctgactaaaattgcctacccgaagcgccccggagggcttcacgggaggagggtagactctcctttgcccccgcacccccacccccgctgcctaggggttttgggaaagccgcgggagtgggagggaatgcgggaggtgattcttccaaagccaagtctgcagctcgagcctcagtttccccatctggaattcgccttcccgctgacatctccgtagcgaagcctaagaaattggagggctcatcctcttcttgcgggggtcaaggggactgaaaggacgtgcaggaaatgagatccatcgcagactcagctcccctccctccttcctgtcggtgcttttccactcactcgcctgctctcccatctccccgccccctccgcctgcctcctcgaagcactgtgggattccgaggttgctgcagccagagaagctgcagaaaaacacggagctgggggtgaagggggacttaaaaggggaactacccggaaggacccaagaacacaaagacagagccactgcggttatctggctggtcagcaagggtatgcggcttcctccgcgctgcggaggctcccagagccaggtcacccattctgccagctcaagtctgttgtcatgggaaccaaaccttccaacttaagaatctgggggcgactttctagcgtgggaggaagggtggtgtgcacggttgctgagatggaagcagggttttgttactcagagccaggctgcggaggggcggggtgccgggcgcctgggttctattccaggcacagcagcagactggcagagcgcgtgagcagctgtggtttgtcccctaattggtatgtgtgcctataaagctctgaaccagaaaggcgtggcctccggggggacgggagggaggcggcaggcaacccatccccacacctcaggccatactgaggaggcagctgcccaggctccagggctatttaaaaggcttttatttccagttccagagcccgcccgaatgggtttgtggtcctctccaggcctctccctgtctatcctgggcctgctcattgctggtctggcttttttgtgcaggtcataacg

SEQ ID NO: 442 - DNA, 85390 bp, Homo sapiens
  source 1..85390: mol_type = genomic DNA
gatctgcccgcctcggcctcccaaagtgctgggattataggcgtgagccactgcacccggcccggagacattgtttatacacacacacacacacacacacacacacacacacacgtgtgaaaagtgggtattatgatactgctgtcattgagatattttaattgaggaataaatttttttcctgtgatgtttcttgggacatcaatatttgagtatataaggctttttctttaatccattaactataaattttgaagaaaatgcatgagaaaatggagaaaatgtgttttttttttaaaaaaaattgagattaaggtctcattatgttgcccaggctggactcaaactcttgggctacagtaatcctcccacctcaatctccagagtagctgagactacagttgcctgaaactgtgcctggcagagaaaaaagcttaaaaaaataagaacatggtaatgatttgataatattcagttacatttacttttgattcttgtaattcaagtaaactcaattttatgtctgatattttctcacagctacctatatatttcttcccaatttaaaatatattattttattttatgcctagcaaatatctttacagtataaatatttacgctcatgaaagtacgtagccagttatttcttagggagaattttttccctatattttgatgggcttccaaaagtattaccagtaattctcagtaattacaattaggtcagttacccaggaaaaggtaagtctgtaacattctttggactaccaattttcttttactaagtttcctgaacaataaatatttttgaaatataatgtattaatagaattctggagtacttccattatttccagtcaatgcaagttggaatgcttctactttatgctaaaaatattaatgtttctttttcacttgggttcttgttaagtgtgattctgataatgtatacaatcacatatcatttttaggtttccataatatcatgaaaatttgatttttaagcgttacatgtcaacaacctggtaaagtaatccttccattcaggatcattcaaggaatctatttaaaaatattttccccaaattatagctgaatcagaaagtttaaattattatattatatgatttgtcaaaaagagaaactcctagggagacatctccataataggtgtgttgggggaacagtaatctcaaagcagatgcactaacattataagattaaaatcattgtttatagaaacttccaattcatttaaaagctcattggggaaaaaaaagctcattgggaaaaaaaaaaaaagctcactaaagtttctattaaagcgaatacggtagatttccatccccttttgaagaacagtaggtggagctatttaagatataaaaacgaaatatcctttctgggagttcaagattgtgcagtaattggttaggactctgagcgccgctgttcaccaatcggggagagaaaagcggagatcctgctcgccttgcacgcgcctgaagcacaaagcagatagctaggaatgaaccatccctgggagtatgtggaaacaacggaggagctctgacttcccaactgtcccattctatgggcgaaggaactgctcctgacttcagtggttaagggcagaattgaaaataattctggaggaagataagaatgattcctgcgcgactgcaccgggactacaaagggcttgtcctgctgggaatcctcctggggactctgtgggagaccggatgcacccagatacgctattcagttccggaagagctggagaaaggctctagggtgggcgacatctccagggacctggggctggagccccgggagctcgcggagcgcggagtccgcatcatccccagaggtaggacgcagcttttcgccctgaatccgcgcagcggcagcttggtcacggcgggcaggatagaccgggaggagctctgtatgggggccatcaagtgtcaattaaatctagacattctgatggaggataaagtgaaaatatatggagtagaagtagaagtaagggacattaacgacaatgcgccttactttcgtgaaagtgaattagaaataaaaattagtgaaaatgcagccactgagatgcggttccctctaccccacgcctgggatccggatatcgggaagaactctctgcagagctacgagctcagcccgaacactcacttctccctcatcgtgcaaaatggagccgacggtagtaagtaccccgaattggtgctgaaacgcgccctggaccgcgaagaaaaggctgctcaccacctggtccttacggcctccgacgggggcgacccggtgcgcacaggcaccgcgcgcatccgcgtgatggttctggatgcgaacgacaacgcaccagcgtttgctcagcccgagtaccgcgcgagcgttccggagaatctggccttgggcacgcagctgcttgtagtcaacgctaccgaccctgacgaaggagtcaatgcggaagtgaggtattccttccggtatgtggacgacaaggcggcccaagttttcaaactagattgtaattcagggacaatatcaacaataggggagttggaccacgaggagtcaggattctaccagatggaagtgcaagcaatggataatgcaggatattctgcgcgagccaaagtcctgatcactgttctggacgtgaacgacaatgccccagaagtggtcctcacctctctcgccagctcggttcccgaaaactctcccagagggacattaattgcccttttaaatgtaaatgaccaagattctgaggaaaacggacaggtgatctgtttcatccaaggaaatctgccctttaaattagaaaaatcttacggaaattactatagtttagtcacagacatagtcttggatagggaacaggttcctagctacaacatcacagtgaccgccactgaccggggaaccccgcccctatccacggaaactcatatctcgctgaacgtggcagacaccaacgacaacccgccggtcttccctcaggcctcctattccgcttatatcccagagaacaatcccagaggagtttccctcgtctctgtgaccgcccacgaccccgactgtgaagagaacgcccagatcacttattccctggctgagaacaccatccaaggggcaagcctatcgtcctacgtgtccatcaactccgacactggggtactgtatgcgctgagctccttcgactacgagcagttccgagacttgcaagtgaaagtgatggcgcgggacaacgggcacccgcccctcagcagcaacgtgtcgttgagcctgttcgtgctggaccagaacgacaatgcgcccgagatcctgtaccccgccctccccacggacggttccactggcgtggagctggctccccgctccgcagagcccggctacctggtgaccaaggtggtggcggtggacagagactccggccagaacgcctggctgtcctaccgtctgctcaaggccagcgagccgggactcttctcggtgggtctgcacacgggcgaggtgcgcacggcgcgagccctgctggacagagacgcgctcaagcagagcctcgtagtggccgtccaggaccacggccagccccctctctccgccactgtcacgctcaccgtggccgtggccgacagcatcccccaagtcctggcggacctcggcagcctcgagtctccagctaactctgaaacctcagacctcactctgtacctggtggtagcggtggccgcggtctcctgcgtcttcctggccttcgtcatcttgctgctggcgctcaggctgcggcgctggcacaagtcacgcctgctgcaggcttcaggaggcggcttgacaggagcgccggcgtcgcactttgtgggcgtggacggggtgcaggctttcctgcagacctattcccacgaggtttccctcaccacggactcgcggaagagtcacctgatcttcccccagcccaactatgcagacatgctcgtcagccaggagagctttgaaaaaagcgagccccttttgctgtcaggtgattcggtattttctaaagacagtcatgggttaattgaggtgagtttatatcaaatcttctttcttttttttttttaattgctctgtctcccaagctggaatgcagcggtacgatcatagctcactgcagcctcaaactcctaggctcaagcaattatcccacctttgcctccggtgtaacagggactacaggtgcaagccacctactgtctgcctatctatctatctatctatctatctatctatctatctatctatctattactttcttgtacagacaggagtctcactatgttgagcaggctgatctgaaacttgggctcaggctagcctcctgcttctccctcccaaactgctgggattacaggcgtgaaccacagtgccccgcccttatcagatattcttttctggctgggcgcggtggctcacgcctgtaatcccagtactttgggaggccgaggcgggtggatcacctgaggttgggagtttgagaccagcctgaccaacatggagaaaccccgtctatactaaaaaaatacaaaattagccgggcgtggtggtgcatgtctgtaatcccagctacttgggaggctgagtcaggagaattgctttaacctgggaggtggaggttgcaatgagctgagattgtgccattgcactccagcctgggcaacaagagtgaaactctatctcaaaaaaaaaaaaaaaaaactttatcctctagtttcatccattgatgacacttgctttaatcacttattacaatcacctccaaatgaagattttataattccattgtttcttctacagttgttaattggctttctaccttgaagaagagttttatattctctatatatgtttgtttctatgattctggaagcatggttttctattttattcaatggcctgtaatctgttaatatcaattatttattttgatgctgaaattgtcccaggattggcctttgggactccctttaggctgatttctatgtcctttctgttacagcaagcttgggattatatccaagatttgtaattccaatgtacttacttctgtcagtgtaaacaaagtacgatttctggactagatgacttgggcattgtgggggaggtggaaattagaggtattctctgtttttcctgtaggatcttgcatttcttcctcttgctgcttgtctctttgtgtcgggaacaggccccccaaaatctggccataaactggccccaaaactggccataaacaaaatctctgcagcactgtgacatgttcatgatggccgtaatgcccatgctggaaggtagtgggtttaccggaatgagggcaaggaacacctggcccgcccagggcagaaaactgcttaaaggtgttcttaaaccacaaacaatagcatgagtgatctgtgccttaaggacatgcccctgctgcagataactacctcaatccatccctttatttccgcccatctcttcgtttcccataagggatacttttagttaatctaatatctatagaaatgatgctaatgactggcttgctgttaataaatatgtgggtaaatctctgttcagggctctcagctctgaaggctatgagacccctgattccccacttcacacttctaaaaaaaaaaaaatttttttttctgagcttggagaaatatatcccttagtacacttggcatttataaagcagacatcaataaatttatatatatgtgacagataccaacaacaatccagtccccttccctcataccttatttatgtacatatattttatataatagatataatttattaacaatttataaaattactttgttaatactctatatcattttctagctgaatttatcaatgataatgctcttttcccacttttatttttttcccattgaccatgcagcagttttgtgtagaccgtctgataacaactgatctgtttatctaggggggagaaatctaattcaatggaaaatataaataaaattgtgataaacttttgtaaatagagtggcttttaactacacttgagatggctagcaaattcataaagtgaatttactttctttcaaagttcagtaattctttctggccattagggatatgtccatttatactttctcagtatcccaagtcatttcatggttttaaatcattcatgaacttccaaatatagtgaatttatttcttctgcatttaaaattttatcacttaaatatacaatataccgtattgccatgacgaaaaatggtaaagactatttttcacttctgttatgcatttcattaatacgatatctgtatgtgtttccaagttagacatttcttttgcccatttcctacactaatgatactaatgatgactttgtggaatattcagaattaacaaaatgtgttttgagtgctttttttagtactggggcaaatttgcagtaatatcgcctgctttttacattaaattccccataacttttacaactatgggaaaatttctgaaacgtgcacagattccaagtgttttctgagaactttatgcttattgtagagtggttacagacactgaatgctaaagtgtattactctttgaaaagcattgcttgatttcttttggtgaattctgtaaaggtgcagggaaacataacgtcccaattattttttctttcttctttgtttgctgcctatctactttgaaagatacaatagttaaaacccagaaaagagattggaaaccccttagagaatgaaagacatccaagggctctaaaatgcggcagttgctgcttctgagaccaaaaaagggggcaaaatatagagtgtgtggttctacttgtgtgattttttgaaagaaagtatttgaatttatctaaaaatactaaatttgtatttacattagttttcaaatagaatttaataagtacagtgttctataggtaatattgagagaaatagaggacaatgaaacctctctcctccatcatcttgtatgaactaccaaaatgtttatcatatggacagttctcatatatagtcaaatagaaagaaagacataataggaaaacaaatgacttgggaaactaagctaacatggtctaattattctgacctctgctcacctaacttgatttaggaacaaatcattgagagttagagcatgaatagtcaagactgttagaccatatctcaaatatcagtgacttcaatcaactatgtttccagtttaagctgaataggctttattaaatagttgttgaatgaatggataaacaaataatgtactctggggattacctgataccaggattctgaattttcagatgtatcatagaaggatagcagctttgcaattaggtaaattgttaactgtgtcacctttagcaagttatttaatctctttgagcttcagcaaagtaggaataatcatatctaatttgaaaggtcgtggtgatggctagggctaacaaaaatctgattcacaacatgcaattaattaacagtagccatttttagtggttgaccaaaaaaaggatttatattttcaatgccagcacactcgatgttctgttgggaaaaataataatgatttttgtgtgcttctccatatggtataatggaatgatttgtggatggaaataaaactgttctaaaatttttgtgacagctggtttaaaaatcttaagtgcctaggcacattcttgattgagaagccacagttttaggccataaaagatgggggaaagatttttatatgagacaattttgtgagtgttactttttctttgtctgaaccatagtgaaatctaaacaaggatcttgtgaaacttattttaaagaagcagtttacttcaatgggatcttagataatttcaccagaaaatggatcaccgaaaccagaaggctggtgatcattatttggtttgggccatataagaattgaaactaacggcttagctttaggatttttaggacacttgttgataatttaggattcataattaacatatgtgttgattgttttctgagactaactgggcaatgggtttggatgtgtttacatttattctgattccagtcataaaattatgtcaaggactttccttgtctttttatgtgtatgacagatgtgtatgtatccatttcatctaacaagttaaagcgttcagctataatttaaaatttgtagcttcactgttttatagtacctaaaattggaatgtaatcagtcagaagacattcatccactgctttcattccagaagtattatgctttttgaagcagcaatagcataggaatgttgaggagactatactatacttttatagcatatttaatctcgtagatcacttttcaatgaattataaggctgatgacaaatgagcaaattgtatcagttttctttatgacatgtaacagagtatagctgtgatcatgaattggatagttctggtgtaaaaatctgctttatccccatataagatgtcaggttcagaaaagcaaacacatagtttcgaagagatgttgatcaaactgatgaggctaaatctcaagaaagagacacagttaccctctaatgttacactttgagttcacctttttttttttttttgagacagagtctcaatctgtcgccaagctggagtgcagtggcactatcttggctcactgcaacctctgcctcctgggttcatgctattctcctgccttagcctcccgagtagctgggactacaggcacacgccaccacacccagctaatttttgtatttttagtagagatggggtttcaccatattggccagaatggtcttgatctcttgatcttgggatgcacccaccccacctcagcctcccaaatagctgagattacaggtgtgagccaccatgcccgaccactttgagttcacttttaagaaaccatacttaatggaaaattaccagtaacagggcatactgtttaggatgcattcctaaaatattaatggcaaaagatagccagcctatggcaaagctaattggaaaaaatattttataaaggatgagacttctggataccatatgggaagggctctggttcaggaaaatgtttttaaaaaactgtcattgaagagaccatagaatcaaacaaaataatttaatctgtatgtaaaagaagttggtaccaccataatttttcttatacatgtcatataaggatctactctgtgtattgtcattgagggcagatataatttcttagttcatcattaactctctgaagtatttcacacagtagtttgtacaccttctaagtactcaatacaatgcttgagttcaattattggaaagtggtctcttggagaaaaaagaatcatagtgcaaaaccaattattttacatggacttttcctctatatctaagccctaataagaggcagctgtctgatatacatacatacatacatacatatatatatatatatatatatatatatatatatatatatatatacacacacacacacacatatatgtatatatatatttggagtaggggatggagtcttgctctgtcacccaggctggagtgcaagtggtgtgatctcagctcactgcaacctctgcctcctgggttcaagcgattctcctgcctcagcctctccagtagctgggattacaggcgcctgtcaccatgcccagctaattttttaaaatatttttagtagagacagagtttcatcaagttggccaggctgctcttgaactcctgacctcaggtgatccacctgccttggcctcccaaagtgctgggattataggcatgagccaccgcaccctgccaactgtctgacttatcttaaaaggctaaggacctggtttgtttgtcaaattttgaaaatagatgcctcagttcataagatttccatattgtgtggcaggcgcctgtaatcccagctactcaggaggctgaggcaagagaatcacttgaacccgggagacagaggttgcagtgagctgagatcacgccactgcactccagcctgggcgacatagtgagactctgacaaaaaaaaaaaaaaatccatatgtgaaaattcttagaagcttcctatacaatttcagctgaagattcagccaacagttcattctgagactgtgttccatggaaaaagtaaagcccaggcatggaagtgggaatggaaagaaagattctaagcctacaaatactcaaacatcaagaagaaataaaaataagtcatcacttcgacttcatgtgctaacatcactgaggttataaattcccaggaatattttattgcgggagcaagactgcactgctgcctttcagcttgcaaattccagtgagaaacgtctttctctctgctctcaactaactctacagaacgctgtcctctcatttcttcaggctgcagttctagagtagggactcagagtgccactgttggccagtctggaaacagagataaatgagccaatccccagacattccggcttggtggcttttctaatttcatggaatgcaaatccaagagcagacccacaacattcctattatggctcctagttctacaaattataagcaggaacggaacggatttacaggcaatgagttcagctccttcttggctggagattctataatccaagaagagtttgaaaaggggcttatttgggctggagcagcagcaactctaactgtggaaaaggtggggaatggtgctggactgacagtctgggtagaaccaaggcgactactgcctcctttcctgctatttctatcctgctgggcattctctatgatgcagatccgttattcagtcctagaggagctggccaagagtttggtggtgggaaaccttgccaaggatctgggactcagtgtcgaggacatgcccacttgaaagcttcgggttaatgctgaggaataatacttcattctaagtggggaaagtggagacttacttgtgaatgactgaatggatcaggagcagatacgccccccaattatagcttgggccataacgctttgaaatagttgaaggccaggcatggtggctcacacctgtaatcccagcactttgggaggccgaggcgagcagattacgaggtcaggagttcgagaccagcctgaccaacatagtgaaaccctgtctctactaaaaatacaaaaattactgggcatggtggtgcaggcctataatcctagctactcggggggccgaggcaggagaatcgcttgaacccgagaggcaatcgcaccactgcactccagcctgggtgacagagcaaggcgccatctcaaaaaaaatgaacaaacggtagttgaaaattctttaaatgtttttcacattaatatggagattcaggatatgaagaatcatgcaccacggttcagcaggaatgttattaagttacgtatctctgagtttacccagctggaacaagatttgcaacagaacctgcagaagatcctgatgttgagagaaattccttacaaaattatcaccttagcagcaactctatatttctctttgaagtaaaagtgaccaacagtggaaagacatatgttgatcctgtgttagagaagctgcttgactaggaaaagcagagctcccatcccttagtgctagcagccttagacggccccccaacaaagcagcatcactcaactcctgatcctattggttgaagccaatgacaaccctgtgttcatctaggatgtgtacagcgtcggccttcaggaagatgtgcatccgggcactcctgtgctgagagtgagggccaccaaccaggactagagtgtcaaggcagagatcacatatggcttcacaacccagagtacccatatctagtttggccttgatcaaatagtggagaaatgaaaactttaagtacattggacttttaaagatttttaatttccatggttttggtagcaagtgacagagagggactcattgtccagtgtacagttgagaccgaatttctagaagataatgacaatatcctagaggcgatttttacttctaattccacaatgattcccaaagattctgcaccttggacagtaatcactgtccaggatttaaatcacaagatctttaaatcacaagatctggattcgggagaaaacgaggtcacatgtctgatataagaaaatgcaccttgagaaaaatcttcctccaataattaactacatgcttgtaacaaatggggccgtggaccaggaacagacccaaggtataacatcagcatcactgccactgacagaggcaaaccaaccctctcgtccagcccaagcatcaccctactcattggcgatgccaacgacaatgctctggttttctaccaggcctcctacgtcgtccacgtggccaagaacaatcttcccaaagcctccatagtgtgcaagtagacacctccaacctagacttgggacccaacagccaagttccctattccatcgtggccagtgacctggagccacaggcgctgtgattctaggtgtccttgagcgcacagtgcgccttcgaccaagagcagccgcgagccttcaagctcacgctgcaggcccgcgaccaggactagctcgcgctcggcgtcaacgtgagcctgcgcgtgttggtggacgacctgaatgacaacgcaccgcgggtgctgtaccccagctctggagcgcaatggcttcgcgctcttggatatggtgctgcacgccgcggagcctggctacctggtcaccaaggtggtggctgtagacgcagatgtgagacacaatgcgtggctgtcctaccacgtgctgcaggccagcaagcccaggctcttcagcctggaatgcgcaccgacgaggtgctgacagctcgcacgatgggccacaggaaagcgactcgccagcgcctactggtcgcggtgcactgcggtggacagccgctcctctcgctaccgccacgtcaccaccactaccgcccctcgtcgccgacagcctgcaggagactctgccagacctcagcgatcactctgcaaagctacagcctgaatccaaaattaatttatatctggtgattgccttagctttaatttcctttttattcttcctgattgcattgtttgtgctggttttaaagtgccgaagaccccaaaatgatcctgtctgagtctttcccacggatgtctatcccgcgctaagccccaggtttctgggtaactgtagctctatgatgccatattcctaccaggtgtgtgcttctcctacgaatccagggctgagtgaacttcttttttgaatccctacccctcaggactcaatagcagtttcactgcagaaagccccttggggaaggggatgattgtgattattctaattgcttgggcagaatccactctccaaggtgaaaaattcttgatgaaactaagttcagtcacaagcaggttttcttctagcattaaatattttcagagatctcagtaaaaagcatttctagcagcaagaccaaaggcctaagatgagaaatatttggcatggtgagcttgagggacagtagtcaggcagacaagagtatcagacatgccagagcatttggggcctgtaggtaaggagcatgttttgattatatatatttgtatgtgtttgattatattttataattttactttgatattcaaattgtactgatccaaaaataagggagggacaaatcttggccattgtagtatgagagatgtaaatttacaactcagaatccctgcttatcacttctccttcagcacacaactgtttcattttctatttaagaaacttcctctcactgcaaaaagacattctggctgataaagttagcctataatttcagtaaatctaagaatatgactaatggaagttgccagacctaaactttgaaaattattgttccactgaagagcgtcttatgactgagtgttccagtctccttctcaagctgaaccttgcttttcaaaccagattaagaacactatcataagttatactgcattttatttccctacccatgtccactgcatcattctctatagtacaaagagcttgtctcgccaggcgcatctataatcttagcactttggggcgccaaggcgggtggatcacttgagcccaggagtttgagaccagcctggacagcatggcaaaaacccatctctacaaaaaaaaaaaacaaaaattaacaaggtttagtggtccatgcctgtggtctcagctacttgggaggctgaggtgtgaggatcacctgagtctggggagattgaagctgcagtgagctgtggttgcgctcctgtactccagtctgggtgacagaattagaccctgtcccaaaacaaacaaacaaataaagagcttctctccttatgacttatttaaagcttgggaaattgttccaattcaaatgctttaaatggacttgagctaaaacagaatgtggtatatgaaatgttcttataatcaggtgattgtaaaaattgatccagataatgttagcatagcattttactgaactagtagtttacaaacacttcaaaaattatagaataacatttgcatataaaattcctcatacatttccctatcagtgaattggaagcttacaatatacaatattaccaaaaagacaaaaaaaatgaaaaggaaacagttacctttggaaaacataattaggtaaaatgggtaatatggaaagtctgaaaactgaaaaaattactgataagtcaagagaaaaggaatattagtaggaaaattcataaaagtgtgtctgactactcacagcaggtttccttattggtatgtattctgtggtccatctaagctatgttaattttattttaaatgctacctgggtattggcttctaaaaggaattcagtaaatcagataatttggcatcttcaatctagattctgatgctcacctgaaaagtctgctaaggattggaaaccaagaaaagtgaagtatctcaacagatatgtgtcacttgtgtgtactggattttttttttttttttttttttttttttttttttttgagatggagtttcactcttgttgcccaggctggagtgcaatggcatgctctcggctcactgcaacctccgcctcccaggttcaagtgattctcctgcctcagcctccctagtagctaggattacaggcatgtgccaccacgcccagctaattttgtatttttagtagagacggggtttctccatgttggtcaggctagtcttgaactcccaacctcaggtgatcttccctccttggcctcccaaagtgctgggattacaggcatgagtcactgcgcccggtcgcgtactggatttatattgtgtaatactttgctctagcagtatagtaggtgagacagtgactgtgtctagtgagcaaaaggcacttatttgacacttttgactcttcctttctacttaccttatttaaaattgatttttgcatgtggcatgatgcaccagttcattgaggtaggggttgaagttatttcccatttttttcaataccatttattaaaaatattttcctctttctgttgaatttgcttggtgcctttgttgaaagtcatttcactgatatatgtagttctatttctatattcttgatcatgtttcatttgtctattcttttactaatagcacactgtctcaattattgtagctttatagtaagtcttgctacaaagtcttactacaggacaaagcttgtaggatttttgaatgggatggcattgcatctatacctttatcagggaaagagggaaggagggaggaggatcatcttaacaatattgacacttcaaatccatgaacatggtatatatttccatttaattaggtctttaatttctctcagctatgttgtatagttttcagtgtagagaggtcatgtatatttctcattaaattgtccctacatatttgatgttttctaatgttattgtaaatagtatttttaaaattgtatcttctaattgttcatttctagtttacagaaaaatgaaaaactatgtttttatgtattctatatgcttttgaaaagtaagaggtgcaaagtgctctattcttacactatattgtgtgagaatataagtcgaaaccactctgcataagttcaggcttccattctcttcagtttgtaggttgagagaacccatccagaaacagtaaacattggtgtctgcccaagtctggtcctgggtggttcattcattcatttacataacaaatatttattaactgtctgctatatgcaaggcactgacctatggactaaggatgcagcaatgaacaaggcatatatgattcctgagttaatgggccctattctaatacatgatattttacaggtctgataaaagccaacaaggagaaatacaaaagcactaagagaaagcttatagtagggaagcttcgcctaatctgaaggtcaaggaaggctttctttttttcggaaagtgatatttagagagatgaatagattaataggatgagtagaagttatctaggtaacaaggaaagtaaaaaagaaattgtcaggcagaggaaatagcatgtgtaaagatctttttaaaaaataaaaggtgtgactcaagcaatttaaaagggctagggaggctagaaacagaaaataaatagatgaaactaataaggcagggagagccttgtaaatcacacttaaaattctggattttgttctaaatacccttgtacttaggagctattaaaatattttaaacaaggcagtgacaagatatttgaattattaagcttactctggctgctatatggagaattgatttatgagggttataaatagaaataggaagataagataggagactatggcaatattcctggtaagaaatggaagaagagctggcttggattaaaggggaggcagtggatgtagaaataaatggatgaattatagatatatttaggaaatgggttcaataagacttaataatggaataggtggaatataaatttcatgagggcagggggtgttttgtttattattatattcctaggtgtctgaaaatattgttgtgttgcctggcaagtggtagatcttcagtgaaatattattaactgaataaatacaatggataaatggggagcagggattaagagtgattcctgggtttccacattaaggaactggatggacaaagctaccatttgatgagaatggaagactaaagaatgatagatttaagagaaatcgagttgagttccagccatgttcatttgaaggatctgagaaacagtgcagatattcagtgtgtgattagacatatggtcatcattcttttttttttttgagatggagtctcgctctgtcacccaggctggagtgcagtggccctatctctgctcactgcaatctctgcctcccaggttcaagtgattcttctgcctcagcctcctgagtagctgggactacaggcgtgcaccaccacgcctggctaatttttgtatttttagtacaagacagcatttcaccatattggccaggctggtctcgaactctgatctgcccgcctcggcctcccaaagtgtggggattacaggcgtgagccaccgcgcccagccggttaccattcttttactctgagttcttccattgtgatcatctagtcagatgggtagatccttataaggctgagcataataagcttcctgatagctctacactggtatgttttggggttcatggctgagctacttttgtgttttatttatcttcctgatctctttttcactgtaagaaacatccagcacccagggaaatttgctgtctaattcatactccactcttcagactagtcctagtgttcagttttgttttgttttttttctgtgtctggaattctattaaaatgtgtcaggctgttttaatttttgttgtttaattttctttcacatgattatatgtgctccatggatttttttgtttgtttgttttttgtttttgtttttgtttaagcggggtcttgctcttgtcgcgcaggctggagtgcaatggcttgatctcggctcactgcaacctccgcctcccgggttcaagtgattcttctgtctcagcctcccaagtagctgggactacaggcacatgccaccacacccggctaatttttgtatttttagtagagacgggtttcatcatattggtcaggctggtctcaaactcctgaccctggtgatctgcccacctcggcctcccaaagtgctgggattacaggcgtgagccaccgcacccggaggaaatttttaacctcagtttttcttcaccatctgtaaaactgcatagaaggaatgtttaggataaaagatgcataacaatcataacaaaattgttgggttttaatgttatgagtacacttggaggattctatgtccacacataccttaaacatcctatagagtccttagcattttaaagttgaaaccaacagtatgaatgatggtagaattttcccccccaggaagttagaactgttccatatcttgatagagggatgggttataaggatgtacacattttccaaaactcattgaacttaagagtcttgcatgtgactgtatataaattatactttaattgaaaataaatttaagaaaataaaattggctgggcgtggtggctcacgcctgtaatcccagtgctttgggaggccgaggtgggtgaatcatctgaggtcaggagttcgagaccagcctggccaacatggtgaaactctgtctccactaaaaatacaaaaattagctgggcatggtggcggacacctataatcccagctactcgggaggctgaggcatgagaatcgcttgaacccaggaggtggaggttgcagtgagccaagatcatgccattgctctccagcctgggcaacatgaacgaaatgccatcttaaaaaaaaaaaattaaaagaaaagaaaattagcctcccccaccctcactatacctcagactcacccctgaaagatcactactattcatccctggttatgtacacttacaaacattttctgtgtgtatgcgaatgtatgtgtggggttttctttgcacaacaggatcattttacagtatatatactgttgtgcaacttgctctttccacttaatatctcaaggaatcttttctttgaatctttatagccatgtacctcaatcttagtagttttctttattttatttttgaataggaaatacatttacatggttttaaaaatcaaaacaatatactatgtatatattgagaagtctgacttccatccctatcctactcctattccacccttgcttcctcctgtcccctgtaggtaaacattttataactttattaagcatcctgtcagcatttcttatgcaaatatgtacatatatttttatttccccattttttttacaaaaagataaaatactatacaccactttatatcttcctttcttcacattatatcctttaaaaatatttccatattggccgggcgcggtggctcacgcctgtaatcgcagcactttgggaggccgaggcgggaggatcacgaggtcaggagatcgagaccatcctggctaacacggtgaaaccccgtctgtactaaaaatacaaaaaaaaaaattagccaggcgtgatggcgggcgcctgtagtcccagctactctggaggctgaggcaggagaatggcgtgaacctgggaggcggagcttgcagtgagccgagatcgtgccactgcactccagcctgggcgacagagcaagactgcaactcaaaaaaacaaacaaacaaacaaaaaagaacttccatattaatatatagaaagctgttttttttaacagttgcttagcattcctttggattattaaccagtctcataaatgagcgctattgaatagccctgtacctacatcagtttttacatatgcagtatatctttgggatgaattcccagaaatggaattgaaattgctgggtcaaagaggaaataggtgtaattttcttaggtattttcacaagaagtgttaattctaactttctgttttgaaatgatttcaaattttcaaaggagttgcaagaattgtacaaagaactgtatctccttcacccggatgcaccgggtgaattatatgtattatataattgtatctgtaggccaggtgcagtggctcactcctgtaatcccagcactttgggaggctgaggcaggtggattacttgaggccaggagttcaagaccagcctggccaacatgataaaactccatctctactaaaaatacaaaaattagccaggcctggtaccccatgcctaagggtgaggcatgagaaatgcttgaacctgggaggcggaggttgcagtgagccgagatcgcaccactgcactccagcctgggcgacagagcaagactctgtctcaaaaaaaaaaaaaaaaaaagtaaaaaagttttttaaaaagatgtatctatatatacatatttacatacacacccaagtgtgtatgtatatatgtttgtgtgtatgtacacaaacacattatttttatatgatatgatttttttatgacatgattatttttatgacatttgagagtaagttgtagaaattatgtttctttattcctaaatacctcattgtgtatttcctaacaaggacattcttttatataattaaattttaataataaaaatcagaaaatttaacatcaatgcaatataattatttagcctatagtccatatttaaattctaccataccttatagtatattttactatacctcatagtaattttttttagtccaaaatatcacacattgcatttagttgccatgtctcttttttttttttttttttgagacagggtctcactctttcgcccaggctggaatgcagtggtatgatcttggctcactgcaacctccgcctcccaggttcaaatgattctcctgccttagcctcctgagtagctgggactacaggcatgtgccaccacactcccaccacacccagctaatttttgtatttttagtagagacaaggtttcactatgttggccaggctagtcttgaactcctgacctcaagtgatctgcccacctcagctaagtgctgggattacaggcgtgagccaccatgtgtggcctagttgccatgtctctttaatctactttaatctgaaacagttcctcagccttgtttgtttatatgaaactgacatttgtaaagactagaagccatttgtcttgtataatgcctttaatttatatttgttttatgtttcctcgtgattttatatatagagtttgtttgtttgtttgtctgtttgtttgttttgagatggagtctcattcttgtcacccaggctggaatgcagtggcgcagtctcggctcactgcaacttctgcctcccaggttcaagcaattctcctgcctcagcctcctgagtagctgggattacagatgcctgccaccatgcctggctaatttttgtacttttagtagaaacggggttttgccatgttgcccaggatggtctccaactcctgacctcaggtgatccgcccgccttggcctcccaaagtgccgggattacaggcatgagccaccgtgcccggacctcatgattgtatttatttatttatttaatattattattattatttttttttttttgagatggggtcttgctctgtcacccaggctggtgtgcagtggtgcgatatcggctcactgcaaccgctgcctcccagattcaagcaattctcctacctcagcctcccaagtagctgggattacaggcatgtgccaccacacccggctaatttttttgtattttttttagtagagacgaggtttcaccatattggccaggctggtctcgaactcctgaccttgtgatccacccaccttgacctcccaaagtgttgggattacaggcgtgagccaccacacccagccttatgattgtatttagactagacatttttttggtagtatattatttagccattgctgtgtaacaaattatcccaaaacttagtggcttaaaagaagcatttattatctcataaattttgtggatcaggactgggtatagctttgctgagtgcctctgcctcaaagtcttacaaggcagcaattaaagtgtcacctaaggctattgtcttatctgaagggtcaacagaggatggatccgcttctaatctctctcacatagttaatggcaaaattaagttccttgtggattgttagactaagggttccagttccttgctggttgttagcttgaggtctacctcagttccttgccatgtggacctccatagggcaaccagcttctgttagagcaagtaaaggagagtgccagagagggcaaatgtgatgaaagccacaatctttttataaacctaattttgaaagtgacatacaaggctaggcatggtggctcaaacctgtaattccagcactctgagaggccaaggagggtggactgcttgagcccaggagttcaagaccagcctgggtaacatgacaaaaccctgcctctactaaaaatacaaaaattagctggtctggtggtgcatgcctatagtcccagctactcaggaggctgaggccagagaattgcttgaacccaggaggcggaggttacagtgagccgagatcacaccactccactccagcctaggccacagaatgaaaccctgtcaagaaagaaaggaaggaacaagggagggagggaggaaggaagggaggtagggaggcagggaaagaccgagaaagtgacataccatcatttttgctgtagtttgttcattagaagcaaaatcacttggtccagcccacactctggggagatgattttctaactccatttgtaataacttattctacttttattagttggcattatacagtaagaaagagctttcttttctcttcttatttattcatatatggctcatgtgttttttccaatgagttatattctattactaacattttttattttgacctcaaattgttttagatgttaccaataagaacctcttcaagctggttcttgtgtccttttgccataactctctcattttcttgaaccctttcttactttctgatataagaaaatattagagactcatactttccttgttccagttctgagatgaaccatttatccaaaagccttgcttcattttagtagggaatagtatttagaaactaagatctgggtgtgaggtatgctcactgctaatgggctgtcactgtttctaggccttgtcagcagacggagctaggaaaaacacacataaacacacccatatttatatttgtacacacactccctcaaaatcgtgagttcatattgatacctccagttctggttcttcctagccttccccctttccatctttgtatttttattttccaacagtaagaaccctggctcccagtgctatgaatatatttactcatttgctccatccactgcactccagcctaggccacagaatgaaaccctgtcaagaaagaaaggaaggaatgagggagggagggagagaggaagagagagaaggaagaaggaagggagggagggaaaactgagaaagtaacataccatcatttttgctgtagtttgttcataagaagcaaaatcacttggtccagcccacactctggggagatgattttctaactccatttgtaataatttattccacttttattagttggcattatacagtaagaaagagctgctgaagatttgcttgcaattggttgtctttaaactgagggtatattgtcaaagtactgtgctgaaaagttacctgtagtatagttatgtgattcattaaaataaagtttgtttctattatgtgcagttttagagttttgccacactctggttgattagtatattttctgttgcttttttgttttgttttgttttgttttgtttttgagatagggtctcgctatgtcacccaggctggagtccagtggtacaatcacagctcactgcagcctcaacctcgtgcacttaagcgatcctcccacctcagcctcccaaatagctggggctgcaagtgcacaccaccatgactggctaattttttaattatttatttatttatttatttattttagagatggggtctcactatgtttccccaggctgaccctgaactcctggggtcaagtgatcctcctgccttagcctccaagtgctggtattacaggcataagccaccacacctagcctagtattcttttttgaatatgtaaaacattaacataaagtcaaaactattaaaaaaaggtgtactcagaaaattgtcattcctcccctataccttctgcctcattcacaccacactctgtagataatcgatttcattagtttgtggtttatcctcactgtgtttctttttgcaaaacgcaaaaacaaaacctatacatatttatattttcttatgtcctcttctttcttacacaaaaggtaacacactatgtaggtagtcctggctttgaacagtttcactataaaaatatttgttactacagcttaaataacataagtctcctaaaaataattcaaattttagttaccatggtatattaactttgagtagttccataaaggacaaacttggctgctagcccttcagtccacagagcactttgaaaataacagatgagcaaaataatgtggccaatcacatgacttctttcaaagtatgtcagtgatcagtcactgtgtgcctataatttagttcatgcacagacagcaaagcatgtagttgtgttgccttccagtgataaacccacataacattttagaaaaatgtattaagaattggccagcaaagataaaagtgcagcaaagaaacaaaagtgataatgttttcagtgaaatttgaattgaacataaatggagttatagaagaaatagctgaccatgggaatgttcacactgctactttcaagaatctctagaagggcagctaaaggagcttagtgaaggtgaatttattgacatgaatgagaaaagtaattgtgatgaaaaggatgaagatgtcccagagaaagtaatgccagcaaaaacttcacattaaaggaactctcagatatttcaaagcattgaaacctccaagaataaataaaatgttggaagttgatccaaacttagaaaggagtatggcaacttgtcaagatgaagaaaaggtgcttattcctttttatttatttatttagagacagagtttcactcttgttgcccaggctggagtgcaatggcatgatctcagctcaccgcaacctccacctcctggattcaggcagttctcctgcctcagcctcccaagtagctgagattacaggcatgtgccaccacgcccggctaattttgtatttttagtagagacagggtttctccatgttggtcaggctggtctcgaacccccaacctcaggtgatctgcccacctcggcctcccaaaacactgggattacaggcatgagccaccatgctccacctgcttattccatattatatgttataggatgaaaagaggccaaactaatcttgacatgttttttacaaggaaataatcctccatggttctaatttttttttttttttttttttttttttttgagacagagtcgcgctctgtcacccaggctggagtgcagtggcacgatcttggctcactgctagcaccgcctcccgggttcacgccattctcctgcctcagcctcccgagtagctgggactacaggcgccggccaccacgcctggctaattttttaaaaaatatttttagtagagacggggtttcaccgtgttagccaggatggtctcgatctcctgacctcgtgatccgcccgcctcggcctcccaaagtgctgggattacaggcttgagccactgcgcccggtgggtctaatgttttaaattacactgtgttaaataaatattagtttgttggttttttttttagtttttttatttctctacaaatttacaaccaataagagtttttaatgctttgacaaaaaatgttaaaggtcatagtacaatcgcatttcttcccattgattattaacatcactttacatagtttcatcttgcattagcaattttgtgtgtgtgtttgtggttttaaggagcggagagtttaataggcaagaaggaagggagaagacagaaggaaggagctcccccttacagagacagagggagcggggctccaaaagaggaggtccccatctaccgcggataccagccaggtatatatgcagaggctggtggaggtgatgtctgatttgcatagggctcaggggattggtttgaccaggcatatcattcacgtagcccgagaaaaagctggccctcccaccccagccttttaatatgcaaacgtagggcgccatggatgttctaaacacgtggagatatgtggggggcagccatgtggccaggaacttgtggggcaagggcaagaaggctgtgggaatcgccaagttgaatggacctagtttctaatggcctgcatttgcatatcaaaggttgctggcctggctcctagagccggggctttaaaagaaacttttccggagatgctttaaaaaatgaaaacttcccaaggaccccttttcctgtctatctgcataaaataatttcttttattatttatttatttatttatttatttatttatttatttatttatttatttattttgagacggagtctcgctctgtcgcccaggctggagtgcagtggcgcgatctcagctcactgcaagctccgcctctcgggttcatgccattctcctgcctcagcctcccgagtagctgggactacaggcgcccaccaccacgtccggctaattttttgtattttcagtagagacgggatttcaccgtgttagccaggatggtctccatctcctgacctcctgatccgcccgcctcggcctcctaaagtgctgggattacagaataatttcttaataactcctaccacattcctccctgtggcgatatcaaactaactgctgttaggaggctttgggcgaccattgcttctggctacttcctgctgaaaaggggcgtctaatggagaacagcagctagggctcctcctggggttgatctaagggtcctcggaagaatggcgtccatgtgtggttcagtttacagcaccgtttggagtttgattgcttctaggcgagaagaaacaattcaagttatagtattgagtatacagagtccaaatatcaatacaagacatataagcaagagagtgcttaataaaggggttaaccaattccataaagaagactggaagtaattaaagagggattgtagccactcggggctgaagcccacattttccctgagcctgtcaataattttgatttgatttttaagtccctgtagatttgcctcttctttactacaggtgttaatcccaaagaagcatgtttcatttaaaaatgcattactggccaggcgtggtggctcgcgcctgtaatcccagcactttgggaggctgaggcgggagcatcatgaggtcaggagtttgagaccagcctggcctacatggcaaaaccccatctctactaaaaatacaaaaaattagccatcgtggtagtgggcgcctgtaatcccagctaattgggaggctgaggcaggagaatcgcttgaacccgggaggcagaggttgcagtgagccgagatcgcaccactgcactccagcctgggcaacagagcaaaactccatctcaaaacaaaacaaacaaacaaacaaacaaaaactgcattactaaatccaataaaaagtcctagtagactcagtgatagtaaaactttcatgcttcctttttgccagtaactattatccctgctataaggatactaattaagcaaaatacgacagcaatggaaactctgtccaatatttcagttagaaggtgctaccatggataaccctattgcaaatagtagagtgaggaaagcagttcccacaaatgtggtgtggtaggtaatttccatctaaaattttacttgccaacatatagaattcccctctgtgggcctacgaagttccttggttttattttcccaaacaaagaaacctccgggttacaggtaccttacttactttcattacctggcacaatttgcaaaataattgcccagaactagcatattgattcacattttcacattacccatccctttttcccccccaccaagctgcagaagatcaccacttgattcacaggaataagcagggccagggttagtctaaaatgtaggcaaaaagcttaaaaacaattaatgagactagggtttaatgacaaatgtatgataagctttggagcaaaatttttctctccagtcctcatttttggtaaaaactaattatgaatgaactttaatcttatacttggcctgattatttgcatgaagtgcagcaagaatggttatttctacataggacttttggattggctttgatgaaacactgttccacaaggaatttcagattagacttttaaagctgagcccagacatgggtttgtatcctctaatacctgtgagttgggttatcctctcctcttgaggtcccaagataaactcagagcttccagacctgttagaaagtgacattcttcactgaccacaggttaggaaccctgtgtggggactgtgtagacaaggtgtgaggccagttctccccaaggggcttttattggctctgcatgtcaagcttgattccttaaagggaaacacaccctttcagttaaagccttggcaaaataaccggtttttccaattgtgttctgttgacaaagaaaaatggattcttgctgcactgatgcgaacaactatattgccgtaagttaagagtacttacagatagtctccaaattttagaggaaccaggcagagaaaaatgaacatgctccaaattttgttcacagtagtataccttacttgattattaaaggccataaatagtttaaaataagtttcctttcccagtccatgcaccaaaatgatacggctctgatgagtggaggaacaacagggttcctggtcctcatgctggtttagataaaatgacacagacacatgtggagtggttttaaggagtggagagtttaataagcaagaaggaagggagaagagagaaggaagacgctcccccttgcagagacggagcgggggttccaaagctgaaagaggaggtcccccacattaacaatttttaaaataccgtacaactgcagaaaatgaggactgcctgtacatactgtttgacactttgtttttttttttaacttatcaactttattttgtttgtttgttttggttttgggtttttgtttgtttgtttgttttggagacgagtctcactctgtcagccaggctggagtgcagtggcacaatcccagctcactgcaacctccacctctcgggttcaagcaattctactgcctcagcctcccgagtagctgggattacaggtattcgccaccacatccagctattggttttggtttttgagacagggtcttgctgtgtcacacaggctggagtgcagtggtgtgatctcagctcactgcaacctctgcctcccaggctcaagtgatcctcccacctcagccttccaagtagctgggactacaggcatgcacaccatgcgcagctaattttttctattttttgtggagacggggtctcactatgttgcttaggttggtcacaaattcacagcctcaagcagtcctcctgcctcaccctcccaaagtgctgggattacaggcatgagccaccacatccagccttaccagctatattgaagtataatttatataacataaaatttgccttttaaaattatacagtgcaatgcattttgacaattgtttacatctgtgtaaccaccatgcaatcaaaatatagaacatttctataaccttcaaaagttccctcatgcccctttgcaatcaattcactacttctccagctccaggcaacaactggtctgcttcctgtcactataaattagtgttgcctctttcagaatttcatctaaatggaatcctataacatatactattttgtatccatcttcttttactccaaagttcttgaaattcattcatgttcctgtgtgtatcagcagcgtgttccatttgattgttgagcagtattgcattgtgtggatatatcacaatgtgttcattcattcaactgttggtggacatttgagttgtgtccagtttagtgctattctgaattaaagtgatgtgaacaatcatgtacaagtatttttgtaggcatattttttttatttctcttggataaataccccaaaacagaattgttttgggggtcatatgaaatgggaagtatatgcttaactttataagaagctgccaaactatttttcaaaatggtaatatcactttacattttcatgagcaatgcataaagcgttccgcttgctacattttctcaccaatgcttcctattgtcaattttttaaattttagcaattctagtgggtgtgtgatactatctcattgaagtttcaactgtttttccctgttgactagagacactgagcaacttttcatgtgttgtctatttgtatatcttcttgaagcattcgttcatctttaactgagctgaacgccttcttaaaattgagctatgggagttttaaaatatatccttgtagctgggcgtgatggcaggtgcctgtaatcccagctactcaggaggctgagacaggagaatcgcttgaacccaggaggcggaggttgcagtgagccgagactgcaccactgcactccagcctgggcaacagagtgagacttcatctaaaaaataataattatacatgtaattatatatgatttttatatatgtaatatatatattcttgatgtgagctctttgtcacatacatattttgtggatattttatcccagactatgacttgtcttttcattttcttagttgtgtcttttgaagagcagaagatgtaattttgataaagcccaatttattttttcttttatagtttgtatttcttatgtcctattcaaaaactccttgcctactgaaaacttatgatgattttctcctatattttcttttagaagttttatagttttaccatttataatttggtctatgaatccttttgagttgatgtttatgtatggtgtatggtgtgaggtaacaatgaagattcatatttttttccaaaggaatatccaattgtctctttggaaaaatatgctgagaaggctatcttttccccaccaaataatcttagcaccttaatcaaaaatcatttggccatggacatatgtaggtgtgggttttttctgggctctctgtgttagatggatagatagacagatacagatatataactgtgtttacacatatgtaactgtaaacacagttatatatctatatatccaccaacagttgaatgagaataaactattgttataagcatatatacacattgtatatatatgtgtacatatacatattgcatatgtatgtatacatatatacacacaaagtatatatatgtatgtatacatatatacacacttaaagtaatggcctccagttcgatccaagttgctgcaaaggacattatttcatgccttttcgtggctgagtaatattccatggtgtatatatatatatgtgtgtgtgtatatatatgtattatgtatatatatatgtgtgtgtgtgtgtgtgtgtgtatatatatatatgtgtatatatatataccacattttctttatccactcattagtcgatggggacttaggttggtttcacatttttgcaattgtgaattgtgctgctataaacatatgtgtccaagtgtctttttcatataattacttattttcctttgggtagatacccaatagtgggattgctggattgaatggtagatctgttttttgctctttagagaatctccatactgttttccatagaggttgtactaatttatattcccagcagcaatgtgtaagtgttctcttttccccacatccacaccaacatctattgttttttgactttttaataatggccattcttgcaggaccaaggtggtagctcgttgtggttttaatttgcattttcctgatgattagcgatgttgagcattttttcatatgtttgtgggccatttgtataccttcttttgagaaatggctatttgtgtcctttgcctactttttaatgggattgtgttttatttttcttggtgatttgttagttccttgtagattctggatactagtcctttgtcagatgtgtactttgcaaagataatattttggatgttatatttccattataatttagttcaaagtattttctaatacaccttgcaatttcttctttgacccatggattattttaaagtttgttattttgtttgtttattttgagacagagtttcactttttttgcccaggctggagtgcagtggcacaatcccggctcccagattcaagcgattctcctgcctcagcctcccaagtagctgggattacaggtgcccaccaccacacccagctaatttttttttcttttttttttgagacagagttttgctcttgttgcccaggctggagtgcaatggcacgatctcggctcactgcaacctctgcctcctgggttccagcaattctcctgcctcaacctcctgagtagctgggattccaggcatatgccaccacgccaggctaattttgtatttttaatagagacggggtttcttcatgttggtcaggcgggtcttgaactcccgacctcaggtgatctgcccgccttggcctcccaaaatgctgggattacaggcatgagccactgcacccagtccaattttttgtatttttagtagagatggggtttcatcatgttggccaggctggtcttgaactcctgacctcaggtgatccgcctgcctcggcctcccaaagtgcagggattacaggtatgagccaccatgaccagcctaaagtgtattgtttagtcaccaaatatgtaagtattacccaaatatatttgtcactgatttctaatttaattgtattgtgatccaaaaatatacattgtatagtttctattcttttaaattcgttaacatttcttttatggcacagaatatggtctatcttggtgagtgttgcttacacacaactgtgtaactgaaaactgtgtattctgcttctcgtggttgttgtatcctataattgtcaactagatcaagttagtaagagtgttgttcagtgatcttttcttcttcagtgtttactgtatttgctaatcccatccagtgaagtttccatttcatatattgtatttttcacttttagaagttccatttgactctttcatttccatcctcaattatcttcatatttttctttaaatttttgagcacatttataatggaggttttaaagtccttgtctgctaattttgtcacctctgtaattcctatgatgattttcttcctggcttggggtcataatttgttgcttatttgcatgtctaataatgtttttattggacagcagacattgtaaatgttatatttttgagtgtttggattttgtctttctttaagaactattgcagtttgttttggaaggctattatgttttttgcagatcaggttgatcttttcaaggcttgtttttaagctttgttaggacaggtctgtagtaacttttgccttgggctaatttagacctaccacttaattctgacttttttgattaatctgagtgttcagcagggtctctttattatggctaaatgaaattcaaacattttccagccctatgtgaccatcaagaattcagctaatagctccctggcagttcttcgcccagctgcagaaaagtgtcagtgcactctatgtatgctcagattattatttagccaaagacttggggatccatattaatattcctggagttctttgtgtagctccattctctttagtactctatcccataaattctggctgcctcaatctcctaatctccccaaactctaatatctattcctcaactcagcaaaaccatggtgttattcttggatttcccctttcctgccccacagtctgaaagttgtctccaggcaaaaaaaatggagatcctagtttgcggatcctcatttccttctccttttttttttttttttttttttttttttgagatggagtctcgctctgtcacccaggctggagtgacgtggcgtgatctcggcttactagaaactccggctcccgggttcatgccattctcctgcctcagcctcccgagtagctgggactacaggtgcctgccaccatgcccggctaattttttgtattttgtttagtagagacggggtttcaccgtgttagccaggatggtctggatgacctcgtgatctgctcacctcggcctccaaaagtgctgggattacaggcatgagccaccgcgcccggcctgcttctcttctcttatgggttagaatcctgcactgtcttttgaacaaatgtctaaaagcttttatcacacattttgatccacttcccagttgttatagtggtatatctggtttcacatgactgaaaggaaaagttttcaccttgctttttgtactaataatatatcctggaaatcattctatataaatttatagaaatcttcatttttaaaatagcttcataaaactccattgtaaaaaccaggtgcagtggctcatgcttgtaatcccacactttgggaggccaaggcgggtggatcacctgaggtcaggagttcaaggccagcctggccaacatggtgaaactccgtctctactaaaaatacaaaaattagctgggtgtggtggtgggcgcctgtagtcccagctacttggaaggctgaggcaggagaattgcttgatttcaggaggcggagattgcagtgagctgagattgcgccactgcactccagcctgggctacagagcgagactccgtctaaaaaaaaaaaaaagcaaaaaaaaaaactccattgtatgtgcacatatcattatctgttcaacccatctatgacttgtcatttaggtagtttccatccaatatttttgcaatataaaaaatgctaatgaagaacctgagatatatatatatctatatatatagatatatatgtttgttgttgttgttgttatttttgaagtatgtacgtataataaattcctaatagtgtgattgctgcatcataaggtaaaggcatatgtagttttgttaaatatagctattccccatcttgcattcctacaaatagatgagaatgtccattgtcccatagtctcctttgcagagtatattgtcaagctttttaattgttgccaacctgatgggtaaaaagatatctccaaataattttaattaaaatttctcttattatgaatgaggttaaatagtttttcatatgtttaaaagccagtttatatctttttgtttttttagagacaggaatcttgttctgttgcccaggccaaattgcagtgatgcagtcatagctcactgtagcctcgcactcctgggctcaagcaatcctcctaccttagcctcccaagtagctaggactacagatggatgccaccatgtccagctaatttttttatttttttgtagagatgtgaggtctcactatgttgcccaggcttgtcttgaactactggcttcaagtgatcctcccacctcagcctcccaaagtgctaagattacagccatgaaccaccacaaatgaccctatatatttttttgaattgtctgttcatgtcttattttcatttttctagtagttttttttttaagtgttttagcctaaatttgtaaaaagtttaggggatatatgaagggactctaaatgtttatgaagaaatttaattaaaagataaaaataaaaatataagctttatttttcaacatgagctccatcaagttcaaggcacttttgtaagcaatgatactagccatttagttcacccctaaagaactgagagtcctgggaatttagccatgtcaatgcagtattttttatattggttactgaagaaaaaatgggtgccctttaaagttgtaagattaggaacaaaaacaagtcagaagaagccaaatcagcactgaaaggtgggcacttaatgattacccaagaaaactctcaccaaattgcccttgcttcatgagaggaatgagcgggagcattgtcgtggtcaggaaggattctggggaagttttcccaggcattttttctgctgaagctttggtaactttctcaaaacactctcataataatcagatcttatcactctttggccctccaggaagtcaaccagcaaaatgctttgaacatcccaaaaaagcgcttgccatgacatttgctcttgaccagtctgcttttgcattggtcaaatgccaccacttccacctcttgtgctttgttttcaggatcagactggtaaagtcatgtttcatctcttgttacagtttttttttttttaagaaacccttcaggatcttgatcacatttgtttaaaatttcaactgaggctgggcccagtggctcatgcctgtaatcccagcactttgggaggccgaggcgggcaaatcacgaggtcaggatttcgagtccatcctggctaacatggtgaaaccccatctctactaaaaatacaaaaaattagccgggcatggtggcaggcacctgtagtcccagctactcgggagggtgaggcaggagaacggcatgaacccaggagacggagcttgcagtgagctgatatcatgccactgcactccagcctgggcaacagagtgagactccagctcaaaaaaaaaatcaagtgaaaactctggtcttaaactgcagctgatctattttatttttattttttttcagacacagccttgctctgttacccaggctggagtgcagtggcaccatcatggctcaatgcagccttggcctcgtgagctcaagcaatcttcccacctcaggctcccaagtagctgggactacaggcacatgctaccatgcctggataatttttttgcagctaatctagatgtaatggttttggcacccatctaatggaaagtttgctcaactttaatttttcagtcagaattgtgtaagctgaaccgagatgtctatggtgttggctattgtttctgctgttaattgtaggtcttctttaattagagcacagacaagatcattttttttcctcccaaattgatgtagatggtcttttgctgtgggcttcatcttcaacattgtctcatcccttcttaaaacaagctagctacttgtaaactgccgttttctttggagcattgtctccataaacttttcacaaaacatcagtgatttcaccgttcttccactcaagcttcatcataaatttgatgtctgttcttgtttccattttagcagaattcatgttactctgataggggctcttttcaaactgttatcttattcttcttagtgcctcaaactagatcctattcagacatggtataacaagttagtatgggtttattttggtgcaagaaatattttgaaatccacacatttttttcataatatgcattttccatgaagtttttgaaaactccttgtattaggaatattagtcctttgtccagtaaacagactgcaaatattttctcacagctcatcatttaccttttggcatttttttgcaatgcaatttttttccctttgtttttgttttttgtgtaatgaatcaatgttttcttttttttttttttttagaccaagtctcactctgtcacacaggctggagtacaatggtgcaatctcagctcactgcaacctctgcctcccaggttcaagtgattctcatctctcagcctcccaagtagctgggattacaggcacatgccaccatgcctggctaatttttgtatttttagtagagatggggtttcaccatgttggccaggctggtctcgaactcttgacctcaagtgatccactcacctcggcctcccacagtgctgggattagagacgtaagccactgcccccggccaaatcaacgttttcttatattgcatttaggttttaagtcatagttagaaagcctttccccacacctaggttatagaaacattcattacttttttcttccagtgctagtacttgcatggtttttggtttccacatttagatccctgatctaattggagtttattcttttgtgtgctgagatatggatctgattatatcttttttcccaaatggctatccagttgtcccaatgccatttattaagcacttcatctttgtcccagtgatttgagatagcatctttatcatgtaccaaacttctatagtgccagaagatttttattttttttagacagggtctggctctgttgcccaggctggagtgtagtggcacaatcccagctcgctgcaacctccgcctcacatgctcaagtgcccgcacctcagcctctcaagtagctgggactacaggcacatgccaccacaccaggctgatttttatatttttttgtagaatgagatttcaccatgttgcccaggctggtctcaaactcctgagctcaagaaatccgcccacctcagcctcccaaaatgctaggattacaagcatgagccaccacacccggctgccagaaaattttaatgatcagaaaaccacaattctttcttcctctgttatatgttgaagtaaaatacttcatttagaaaactaagccgggcacagtggctcacacctgtaatcccagcactttgggaggttgaggcaggcagatcacctgaggttaggagtttgagaccagcctggccaacatggtgaaaccctgtctctgctaaaaatagaaaaatttgctgggcatggtggcgggtgcctgtaattccagctacttgggaggatgaggtaggagaattgcctgaacctgggaggcagaggttgtggtgagccgagaccacgccattgcaccccagcctgggcaacaagagcaacggtaaactccatctcaaaaaaaaaaaaaaaaaaagaaagaaaaaagaaataactcagccatacaaggctacccatttggtgagaactaataataagttagatagcaaggtaatagcaaaatgtgggtgcaaaattaaagcaagttatttctgaggagaatgtaggtctcatggaagattttcatgtggacaaatttagtaaattttttgcaggtagtttcctgacatatttaacatttgtgatatagtaaacaataagaaggtactaaaggctgggcgcggtggctcacgcctgtaatcccagcactttgggaggccgaggtgggcggatcacaaggtcaggagatcaagaccatcctggctaacacggtgaaaccccgtctctactaaaaatataaaaagttagctgggcgtggtggcgggtgcctgtagtcccagctactcgggaggctgaggcaggagaatggcgtgaacccgggaggcggaacttgcagtgagccaagatcaagccactgcactccagcctgggcaacagagcgagactccatctcaaaaataataataataataataaggtactaatatgatccagactagaagagaatagcactaaaatgggagatggggtaaacctgtggttttttttaccttaggcttttgacttccaaaattattgtttttgctgggtgcggtgggtcactcctgtaatcccagcactttgggaggccaaggtgggaggattgcttgagcctaggagtttgagaccattctaggcaacaaagcaagaacctgtctctaaaaaaatttaaaaattagccagaaatggtggcacatgtctgtagtcccagctacttgggaggctgaggcaagaggattgcttgagccttttgaagttgaggcttcagtgagccatgatcaccccactgcactccagcttgggcaacagagcaagaccccatctcaaaaaataaaacaaaatagactgggcacgatggctcacgcctgtaatcccaccactttgggaggctgaggtggatggatcatgaggtaaagagatcgagaccatcctggccaacatggtgaaaccccgtttctactaaaaatataaaacttagctgggcgtggtggtgcacacctgtagtctcagctactcgggaggctgaggcaggagaatcgcttgaacccgggaggtggaggttgcagtgagccaagattgtgccactgcactccagcctggcgacagagtgagactctgtctctaaataaataaataaataaaacaaaataagtaaaataaaataaatgtttgtagttccaaaatattttgatgacataatttcttcttgttctaataaaactacatatgcattggtcctatgacctagtaatcacactattaggaatttatcataaatacacacctcaaaaattacaaaaatacatatataccagcttatttattacagcgttatttgtaattgcaaaaacattgtagatagaatggaggtcacataaaacttattcttaagattcagaccgggtgcaatggctcacgcctgtaatctcggcactttgggaagccgaggcaggcagaccacccgaggtcaggagtttgagaccagcctggccagcatggtgaaaccccatctgtaccaaaaatacaaaaattagctggtcgtcgtggcacgcctgtaatcccagctactcgggatgctgaggcgcgagaactgtttgaaccccggaggcagagactgtagtgatctgagatcatgccactacattccagtctgagcaacagagcaagacttcgtctcaaaaaaaaagatcatagatcatcttatcaaatcaaagtatgcaaaatattcaagtaaacttcagataaatatgaaggctaaaccattcagcttcttcaccaaacccttgaatgtcccacctgtctaaatggagatacatgtttgtttgatttattggttaactgtttttattccatttttcctcaaatgatcccataatttgaccttaggaagctgttcaaatagacacattaggttgaatggaaagactactcgatgatatttaggattttaagaggattttatgtattttttccttgtgtgcaataatttaatagcatcttgaataggattttctgatattactaaccctctgggaataatattaggtaattagacagttagctaatattaaaatatgtatcaggtaatatttattgagagtttcctctgtgccaagcaggatcaacttcataggcaggcgacctgtgcggggacacagggcttcatgcttagataggcccccttgctttgaaggcccctaccctttggttagggctctgctgttaccatcttgaaattcttaataatttttattttatttttttgagtcagggtcttgctctgtcgccctggctggagtgcagtggactcactacagtcttgaattcctgggctcaagcaatcctcccacttcagccttctgagtagttaggacgacaaacacacgccaccatgctcagataagttttttgtttgtttgtttttttgtttttgtttttgttttttgtagagatgggactgtccctatgttgctcaggctggtctcaaattcctggcctcaagtgatcctcccacctcagcctcccaaagtgctgggactacaggcatgagccactgtgcctggtcaatcatttttattaacaagcccaagccctcttttttttttttttttttttgagacagggtctccctctgttgtccaggctagagtgcagtggtgcgatcttaccttcactgcaacctctgcctcctgggttcaagtgattctcctggctcagcctccctagtagctggaattacaggcacccacccccatgcctggcaatttttttgtatttttagtagagatggggtttcaccatgttggcaaggctggtctcaaactcctgacctcaagtgatccacccaactcggcctcccaaagtgctgggattacaggtatgatccactgcgcccggcctccaagccccctatttttattttgcactgaccctacaagttacgtagctaggcttagttatgtttttagcaaggaaagtgtataatctcatgtaccttttgaaagattactcaggtctctgcatgtgaaatggaatttagggaatgcaagagagggagtaaaaataacagcgaggaagctatgatagcatttaaggttgctttgactcaggggtagcagtagatagggtaagtaattgatagtttcaaaatatattttgggagtagtaagcattggtatggattagtaatatactggatgtggggatgcagaaaaaaatattaaaaattacttctgaaattctggctggaatagaagtgccacttaccaggtaaggaaggttggagacataacatatttgagggtgtggtcaaaagatgagtttgacattatgctatgtcatataaaagacatataaaagactacctattttataattcctttttaataaaatattcagaaaaagcaaaactgtggttgcctgaggctgaagctaggaagattgactacagacaagcatgagggaaattttgggggtgatgagagttttctaaaactggattgtggggttggttgcattactgtataaatttattaaaaatccctgcatcgtataggggcactatattgtatgtagaaagctgtgaaaagattttaaaaatgattgacatgtctgtggttatatcaatgagtactattattattcccattttatacataaagaaaataaaagagaagttaaaaataaaagtttcatggttacatagctactaggtgtaatatccagtattggaatttgaatctttttgacactaagaccttactctcgatcatataatacattcactttctattttaaagttatattatagccgggcacagtggctcacacctgtaatcccagcactttgggaagccgaggcaggcagatcacgaggttgggagatcgagaccatcctggctaacacggtgaaaccccgtctccactaaaaatagaaaaaattagccaggcgtggtggcacgcacctgtatcccagctactagggaggctgaggcaggagaatcgcttgaacccagaaggcagagcttgcagtgagacgagatcgtgccactgcactccagcctgggtgacagagtgagacaccatctcaagaaaaaaaaaattatattataaatgctgcatctcattggtcagaagctctcttgaaattataaaacaaagaagaaaaaagataaagactgggaaattgtgttgaatcagtatataaatcctgtatactggtccttccatttcccctagaaataagtgatacaggccaggcgctgtggctcacacctgtaatcccagcactttgggaggcggaggctggcagatcacctgaggttgggagttcaagatcagcctgaccaacatggagaaacccccgtctctactaaaaatagaaaattagctgggcatggtggcacatgcctgtattcccagctactcgggaggctgaggcaggagaattgcttgaacccaagaggaggaggttgtggtgagccaagattatgccattgcactccagcctggggaacaagagtgaaactcaaaaaaaaaaaaaaaaagaaagaaaaagaaaaagaaagaaggaaggaaggaaggaaagaaagaaagaagtgatacaacaagttacagcatctttgtttattatccactgtgagttgtattaccacactttacttggctctttggcaaactatattatctcttcagatcactagggctaggaaggcccactggtaacttgaaggagtaaatgtatcttctaaaaaatgcttacttccagggagattggatccacacaagtgaatacatatatagtccttagtgtatgctatgattattttactatgtcagtagcataaagattgctatattaataagcattaagtgcctgctgtgctagacagtgaggatgcaagtggccaccaaaatagcatggtccctgccctcctggagcttctttttttcttcttcagtgggggaagcagatactttgcttatgcaaaaataattataaaatttaaagttgtgccaagttcaatggaaaaaatataaggtgttctgagagagcataacaaaggatcctggttttaactggggcctaatggaagacctctattaggaaataacatttaaactaagaccagacagacctgtagaaattagcaaagcaaagggagggaggaaaaagcagctttcctggcaaaggaacaatttgtgtgaaggccctgagacagggaagggctggggttctgaccaccctccaagtggtgcaatggaatatagtgagagagggagaagacatgagaacttggatactatgcaaaggatttggtattttaattcaagagcagtatgatgctactgaggagcagctggacaattgtgtgatccaattaaaattttaggaagatgaacctcgctattgtggagaatgcatacacaagggttctgttggttcatgaagaggtcttaagaaaactatgagctgggtgcagtagctcaggcctgtagtcccatctacttagaagtctgaggcgggaggatcccttgagcccaaggagctggaagttacagtgagctatgattattccactgtactccagcctggatgacagagcgagatcctgcctcagaaacaaaaaccaaaaaacaaacaacaacaaaaacaacaacaacgaaaatctcagaaaactacaggccttattatcaagaaaatgacaggccttattattgagaaaactacttacatttttaaaagctgattttcaaaaaccagattgtgaattaagtgatgctgaataggggaaaaaaagactgataaaccagtgtatctctgaataacccactagatcagtgcttgtcaaactttaatgtgttttcaaatcaccctgatgttttgttaaaatgtaagtcatgtctcagtaggtctagaggagggcatttctgcatttctaacaagctccccggtgatgcctagaccattggtcctcacactttgagtagcaagtgattgggctatactctttattctaaattctaaatgtattctatcttctaatgcctatcagccctcttgctggtctggctaattatcaaacttgagcatttaaaactgggggttttcagagattaattgaagtgttaaagacatggaaatataggtcacatatggcttttcatctcttccggaaatatcctatatatccttacttcttttctacctacctaacctatgtgcctaccccttcacttatgttcaaggttctattatacttcaaaaggactctatgcaatcaaagtgatgtccaagacaaatatacagaaatagtatgaggctctaacactttacatctaatggagtggtttgcatcattaattgaggcttactctgtgccaggcactttacctgccttcttcatttaataggataggagcaggaactcttagaggttcatttcttgttcaaggatatacatctcatctctggcttatatcacagtggactcttttattcactatcctaatcattataattttgtttggtgacaacaattctaaatgcagaaaagttaaggctctttattctgtgactaaaggctttgtattttctaaagatttgtggagctttgctgccattatttcaataattttataaagatcctaggtggtaaataggcctggctttttttctttttgaaatcttctccgtcttcttcttcattagcagtgcaacttcttgtggcatatggtacccaagatcttgggaaaaggattgatcaagtaaagggaaacgatagagagagtgtgctctacaactgagatcatgctccttgtgaaagacagggtagggaaatttcttattgctccctggttcttaagaaatgagagctaacaatgacatccagttttaaaagaaataaaatctgaattgtacttttaaattttataagccagagttaaaccaatagattgtaactcctgctaatttgatagtagctccagataatgaggaagtgacagggaatgctaatttcatttggtaagagataaaactgaaattattaatgtctccacggaaatgctaaatgcctccttacaagtagggtccggctaattgtctgtcttccaacaagccagatttgttggtgtttttccagacaatgttgtgtagttttcggtttggttcgatcccctttcttgtgatcaaagaaagtgattcaaatgtttaatgagtcttgatttggattggagacttgcagaacggctagcctcacagccccaaggctggctttccctaaggtaggtttcctatgcaccgatactggcaaggcgctttggctggaaactctggaaggaagccaaaggaaagtgaagttcctggcgctagcgcgtgtcctgctcagagagcccggcgctagctcattcttcgtgcagttattggctgggactctgtgtgccgctgtcggccaatgaagacgctggagatcgggcccctgcccgtcccctttctgcgccccgggatgaggcagagactgaacagccggcgagcaaatcaacggcatccagaaagccatgtcggactcggcgcccagcgcccaagcgctaacccgctgaaagtttctcagcgaaatctcagggacgatctggaccccgctgagaggaactgcttttgagtgagatggtcccagaggcctggaggagcggactggtaagcaccgggagggtagtgggagttttgcttctgcttggtgccttgaacaaggcttccacggtcattcactatgagatcccggaggaaagagagaagggtttcgctgtgggcaacgtggtcgcgaaccttggtttggatctcggtagcctctcagcccgcaggttccgggtggtgtctggagctagccgaagattctttgaggtgaaccgggagaccggagagatgtttgtgaacgaccgtctggatcgagaggagctgtgtgggacactgccctcttgcactgtaactctggagttggtagtggagaacccgctggagctgttcagcgtggaagtggtgatccaggacatcaacgacaacaatcctgctttccctacccaggaaatgaaattggagattagcgaggccgtggctccggggacgcgctttccgctcgagagcgcgcacgatcccgatgtgggaagcaactctttacaaacctatgagctgagccgaaatgaatactttgcgcttcgcgtgcagacgcgggaggacagcaccaagtacgcggagctggtgttggagcgcgccctggaccgagaacgggagcctagtctccagttagtgctgacggcgttggacggagggaccccagctctctccgccagcctgcctattcacatcaaggtgctggacgcgaatgacaatgcgcctgtcttcaaccagtccttgtaccgggcgcgcgtcctggaggatgcaccctccggcacgcgcgtggtacaagtccttgcaacggatctggatgaaggccccaacggtgaaattatttactccttcggcagccacaaccgcgccggcgtgcggcaactattcgccttagaccttgtaaccgggatgctgacaatcaagggtcggctggacttcgaggacaccaaactccatgagatttacatccaggccaaagacaagggcgccaatcccgaaggagcacattgcaaagtgttggtggaggttgtggatgtgaatgacaacgccccggagatcacagtcacctccgtgtacagcccagtacccgaggatgcccctctggggactgtcatcgctttgctcagtgtgactgacctggatgctggcgagaacgggctggtgacctgcgaagttccaccgggtctccctttcagccttacttcttccctcaagaattacttcactttgaaaaccagtgcagacctggatcgggagactgtgccagaatacaacctcagcatcaccgcccgagacgccggaaccccttccctctcagcccttacaatagtgcgtgttcaagtgtccgacatcaatgacaaccctccacaatcttctcaatcttcctacgacgtttacattgaagaaaacaacctccccggggctccaatactaaacctaagtgtctgggaccccgacgccccgcagaatgctcggctttctttctttctcttggagcaaggagctgaaaccgggctagtgggtcgctatttcacaataaatcgtgacaatggcatagtgtcatccttagtgcccctagactatgaggatcggcgggaatttgaattaacagctcatatcagcgatgggggcaccccggtcctagccaccaacatcagcgtgaacatatttgtcactgatcgcaatgacaatgccccccaggtcctatatcctcggccaggtgggagctcggtggagatgctgcctcgaggtacctcagctggccacctagtgtcacgggtggtaggctgggacgcggatgcagggcacaatgcctggctctcctacagtctcttgggatcccctaaccagagcctttttgccatagggctgcacactggtcaaatcagtactgcccgtccagtccaagacacagattcacccaggcagactctcacggtcttgatcaaagacaatggggagccttcgctctccaccactgctaccctcactgtgtcagtaaccgaggactctcctgaagcccgagccgagttcccctctggctctgccccccgggagcagaaaaaaaatctcaccttttatctacttctttctctaatcctggtttctgtggggtttgtggtcacagtgttcggagtaatcatattcaaagtttacaagtggaagcagtctagagacctataccgagccccggtgagctcactgtaccgaacaccagggccctccttgcacgcggacgccgtgcggggaggcctgatgtcgccgcacctttaccatcaggtgtatctcaccacggactcccgccgcagcgacccgctgctgaagaaacctggtgcagccagtccactggccagccgccagaacacgctgcggagctgtgatccggtgttctataggcaggtgttgggtgcagagagcgcccctcccggacaggtaaggtttagcaagtcatgcttgaccctgttagtgcttttttattcctacatcatattgaggaaggaatggagctgtttttttagtgatgaagatgttttcctggtgatgcattcacactttcaactggcccttcctagatcaaagttagtgcctttgtgagatggtggcctgccagagtgtggtttgtggtcccatttcagggggaagatacttgactcatctgtggacctaattcacatcctcagcactcttttgctatcacaactaaccaatcttgctaagggatggttaagctaaaacacaagatctcagcgatcagagtttagcttggtatcatttacattaggaataagctgctggatacctctaaccagtggcagcttctaggaatacaaaaactacctcattcctccacctttcaagtgattgtgacatttgtattaaaactaatagctttttgataattttcctttgtttatacagatcgtgtacctcattctcagataattttttatgaatgaaatgaaattccaggcatcctttaaattttatttcaagcattctactggaaatgatgtgcaccctgcttacaaaatatttttaccttataacagtaatgcatgtttgctagaaaattcagaaaatacagaaaagtatttaaaaaattaaaactataatctccaaacccaaagataaccatttttaattataaaagtaataatttatttcaaaaataaatctaggcaacccaagaaaacataaagtagccagactcagtggtgtgcacctgtagttcttgctgctcagtgcctgaggtgggaggattgcttgagcccaggagttctgggctgtggtgcactatgctgatcaattgatcaatccactgtctgcactaagttcagcatgaatacagtgacctcttgggagggcaggaccatcaggttgcctaaagaggggtgaactggcccaggttggaagtggagaaggtcaaaactgctgtgctatccagtagtgggatgacatctgtgaatagccactgcactccagcctaggcaatatagggaaaccatgtctctttaacaataacaacaacaacaacaacaatcccagaaactacaaaaggagagtctttttggtgcctccagtgttagtccctgtccttccagccttatttttcttaagtatatgcacaatgtgaaaggtagataaattcatatccttagacaggtaaagcattcattaattcagggtggtatgcaaggatactatccaaggcatggtatccatgcaaggtgactgcaaggcctttgccctggagagaaccctatacatactctcaactgtaggagaaacactgttattttgttactcagtgcatcattgctatcaactcttggatttggcagttagtcaaatgaggttctaccatttaccaactaggagtctgtggccaagttactcaatctcctttctaagcctcttcctcatatgcaaaaagggaataataagtgttttataagattcatgcatgatataatgtatgcaaagtgtttagcatggtgcctggcatatcataactgttaaacaattattagccagctcctagcattttgggaggctgaggcaggcggattgcttgaggccagcagttcaagaccagcctgagcgacatagtgagatcctgtctctacaaaaaaaaaaaaaaatgtgttttcattagctgggtgtgttggcatgcacctgtggtaccagctacttgggaggctgaagtgggagaattgcttgagcctgggaggttgaagctacagtcagctgtgattgcaccactacacttcaaccatggcaatagagtgagaccctgtctcaaaaaaaaaaattatcagctattactataattatttttattagttcctcactcacctaaaatctcaaacacaccttagaaatacacatatgagaacaaccaaaaatgacaaagtagaagcacatatgaaaaggctaagaaagcatgaaagccagcaagaaataactgccgctcttctggtcagcctggaaagcaactggcattttccctagaacaatgttttcaaacttggttgcacattaaaatcacctagagaccttttaaaaattctgaaacccaggccacaccccgacaaatgaaagcacagtctctgggggtgggacataggcatcattttttgaaggtccccacttgatcctaatgtgcagacaaatttgaaaaccacagctttgggaggctgaggtgggtggatcataagatcaggagtttgagaccagcctggccaatatggtgaaaccccgtctctactaaaaatgcaaacattagctgggcatggtggcgcatacctgtagtcccagctactctagaggctgaggcggaagcatcagtgagggagaatcagtgaacccaggatgtggaagtttcagtgagcccagatcacaccactgcactccagcctgggcgacagagcgagactccacctcaaaaacaaaaagaaagaaagaaaaaagaaaagcagtactctggaacctaccaatccatcatttagcatatttgtgaagtaaagtgttattctggtatttgcagaaccagaatccagctttattgggccaggcccaatttttttaaaaaacatggtaaggtctcccagccttaaagtattacatagcatagctctaaaagatcactgtaggaagacataaaatggtatttcagtcatctaagggaaaaaccttcctaaagcactagcccctggacaactattatttaaacatctacagctgttcaatagatattgggttctttttggagggatgtgacaaaattcttgtataattagattgtgatgatgattgtatcagtttagtacatgtaaatacactgaaaaccattggattatacactttaaatatgtgatttgcatggtatgtgaattatgtctcagtaaaaatctagagatggggctgggctcagtggctcacgcctgtaatcccagtacttagggaggctgaggccagcggatcacctgaggccaggagttcaagaccggcctggccaacatggtgaaacttcatctctactaataatacaaaaatcaggccgggcctggtggctcacgcctgtaatcccagcactttgggaggcggaggcgggcggatcacgaggtcaggagtccaagaccagcctggccaacatggtgaaaccccgtctctactaaaaatacaaaaattcaccaggcgtggtggctgaggcaggagaatcgcttgatggtggaggttgcagtgagccgagatcgcgccactgcactccagcctgggtgaaagagcgaaactccatctcaaaaaaaaaaaaaaaaaaaaaatcagccagatgtggtggcaggtgcctgtagtcacagctacttgggaggttgaagcaggagaatcgctttatctcaggaagcagaggttgcagtgagccaagatcatgctgttgcattccagcctgggcaacaagaacaaaactcactccatctcaaaaaaaaaaaaaaaatatctagagatgggagaatcatatggctggcataaaaaggtcaagtcaaagatatgtaagattaaggctttacgatgctccagttctagtaaaacagaccaggtacttgttttggtgtgaaattgccaatataagtatagtactgtacatattagttgtttagcttaggtaagtcttttaatctctttaaactccagtttcctcatctataaaataaagagaatatctactttgcaaacttgttgtgagagtgaaaagtaatgcatataaagtccctgtatggagcaagtactcaataactatttgttgaactaaaaatgataatactgatattcaccatttattagcatccctatgtgccagacactgtaaacaattaaaagttatcattctggtacccagagtacagtatgagacagacatgcaaaaaaaaaaaaaaaaaaagataatggagatctgcatagcataagatgcagtgggaccaaacgggaaaaaacacctaaatgagcctggagaaaggaagaaatgatagaggtggtgatgcttgagctatgatctaaaggttgagtagtagcttgtcagacagtaaaggggaaaggacagggcagggaggggccattgcaagaaattccatgcagagggattatggtatttcattatcactgaaccttaaactgtgtgtgtggccgggtacggtggctcatgcctgtaatcctagcactttgggaggccaaggtgggcagatcacttgaggtcaggagtttgaaaccagcctggccaacatggtgaaacctcatctctattaaaaatacaaaaaattagccaggtgtggttgtgggtgcctgtaattccagctacttgagcagctacttgagaggtcgaggcaggagaattgcttgaacccgggaggcagaggttgcaatgagctggtgtcaggccactgcactccagcatgggcaacagagagagactccatctcaaaaaaaaagtgtgcgtgtaaaacagacagtctttgtaggagatgaggtgaagcaagtaggcaggagttagatcctgagttacctttgggccaagccaaggagtttttattttattccatatagatgacagtcactgcagaaatttgaactgatatgcatatatcatgaggtttttttgttttagaaatattattctgtcagtcataagtgaagggactggggacattgggactggaggcaaagagatcttatctctttgcaatagtttgaaagctattgcaatatttgaagagaagattgataaatgcttgaaccagcacagtggcagtacagatggagggagctgactacaataaaatcatcaggacttgttgattgacatgatataggaagtgagggacagggatgagtcaaggctgatccccctagatcctgactaaggaagctgggtggttgacagtgccattcacagagacagtgaattctggcataaacacctaataggtcaggctggtttacacctccatcattcccatgggagaaggtatagaggggtgtgtgtttgtgtgtgtgtgtgtgtgtgtaaaagaacacagaaagccagattcctctttttgacaccagaatattggttcccaccatagtcaaaaggatattcctgaggatcgaggcttggaaaaatattggggaaggataagaactccagttgttgctgctttttttggcagccagtgtaacctaggtaaggacttggttgaattaagaaatttcatgtccagatcaggatggatttttctatttctctgagctctggtgtgtttcccactcagattgcaggtcgtaggtacctacggtgtgaattgtgttgtgtttctgtgcttgtgcaagggagtagctaggttgctgggaggtctggatgagggtgggggtggggtgagatcaagtctccagctccaagaggtcccctggggctaagtgaaaagcttgctcttttgaaatggtcttcgttggtaattaacaaaagatcaagaataccttggtgtcagataaagggaatttgtaggcacaatgctgttggtagctgatctcaatcattcaaggaagctattaaatctatgaacattagcattctgccaggtaaagagatctggtccttagcacctcccagacacactgattctttactgttttgaaacatctccctctcctggcttcctccaccccgcttccatactgtccttgaaatcaatgaatggtaatttagtgtatctagtgtatcactagcaaatgtctgaataagaaaggtttggtttccgctgtgtctcctgttacaatgagaacatgtactgcataaatttaattggctacgttaatgtgtaagccttttctgcaaagagatggatccgtttctgaatattctgcagaagggcagagttttgagtatatggcagtggttctaattagcagttgctccaatacaatcagactgagacggaagctactcatttagaatactggttgatgacaacactggcttgaacaaagtgaccactctccaatggctactctccctctcagtgggccgcaggttgctagggctcaggctgtggctgttttccccgccgaaaaggggcggggtcagtcggtgtgttaggaaaaaaaatgtatatatatatatatgttgtctgcctccccacagagataacaacccgtggaaaaacatgccgttgagcgggaggaaggcgaaaagataggctgggttttttggggggtgggggagcgtggaggatagggtgggctttttcccctccaatgctgcgacgcattaaccctgctgctgttgggacgttctctgctcagcctattggctgagcccgggagccgctgtctgccaatcgggtggtgaaaggcagacaaatctaccccgccaccagcaaaaacggcgcgtaacccttgcggcgccggccgaaccgcgccagagctggcgcggggaaagggagataggtgtctccagctgctgtggctgtttggggcgggtcggcttcatccgcgtctcaggagcaagtagagaattagcgggcggcagcaatgctccgcaaggtgagaagctggacagaaatctggcggtgggctacccttttgttcctcttttaccacctgggttacgtttgtgggcagatccgctacccggtcccagaggagtcacaggaagggacttttgtagggaatgtcgctcaagatttcctgctggatacggacagtctgtcagctcgcaggctgcaggtcgctggagaggtgaaccaaagacacttccgtgtggatttggacagcggagccctgctcatcaagaacccaatcgaccgagaggcactgtgtgggctcagtgccagctgcatcgtgcccctggagtttgtcaccgaaggtcctttggaaatgtaccgagcagaggtagagatcgtagatgtgaatgatcacgccccccgttttccgcggcagcagctggacttggaaattggggaggcagctcctccaggacagcgtttcccgttggaaaaggctcaggatgcagatgtggggagcaattcgattagcagctataggctgagctccaatgaacactttgcactggatgtgaagaagcgcagcgacggcagcctggtcccagagctgctcctggagaagcctttggatcgagagaagcaatcggactaccgcctggtgctgactgctgtcgatggagggaacccgccgagatctggcaccgcagagctccgggtatccgtgctggacgtaaacgacaacgccccagccttccagcaatccagctacaggattagtgtgttggagagcgcaccagcgggcatggtgctcatccagctcaatgcctcagacccggacctgggtcccagtggtaacgtcaccttttatttcagtggtcatacccctgatcgtgtaagaaacctctttagcctgcaccccactactggaaagcttactcttttggggcccctagactttgagagtgagaattactatgaatttgatgtgcgggctcgcgatgggggttctccagccatggagcaacattgcagccttcgagtggatctgctggacgtaaatgacaatgccccttacatcacagtgacctcagagcttggaaccctccccgagagtgcagaacctggcactgtggtggcacttatcagtgtgcaggatccagactcagggtcaaacggagatgtgagcctccgcattcctgaccacttgccatttgccctcaagtctgccttcaggaaccagttctccctggtgactgctggacccttggatcgagaggccaaatctagctatgacatcatggtcactgcttctgatgctgggaaccctcctctcagtacccacagaactattttcctcaatatttcagatgtgaatgataatccaccctctttctttcagaggtcacatgaggtgtttgttcctgagaacaatcgcccaggggacctgctttgctcccttgcagcctctgacccagactctggcttgaatgcgcttatctcctactcactcctggagcccaggaatcgagatgtatcagcttcctctttcatctctctgaacccccagacaggagctgttcatgctactcgatcctttgactatgagcaaacccagacactgcagtttgaggtgcaggcccgggatcggggcaacccaccccttagcagcactgtaacagttcgtctatttgtgctggacctcaatgacaatgctccagctgtgctccgtcctcgggcccggcctggttccttatgtccccaagcactgcctccatcagttggtgctggccacctaatcacaaaggtgactgctgtggacttggattcaggttacaatgcttgggtttcctatcagctcctggaggccccagatcccagcctgtttgcagtctctcgatatgctggggaggtgcggacggctgttcctatcccagctgacctcccaccacagaagctggtcattgtggtaaaggatagtggtagtccaccactctctacctctgttactctcttagtgtccttagaggaagacactcatccagttgtcccagatcttcgagaatcttcagctccaagggaaggagaatctcgtctaaccctctacttggctgtgtccctagtggcaatttgctttgtctcctttggctcattcgtggcactactctctaagtgtcttcgtggggcagcctgtggagtcacatgctttcctgctggcacctgtgcctgtctcaccagatctcgaaggagggaggggcttcccccttccaatgggatcctccgaatccagctagggtcagatgaccctatcaagtttgttgatgtgggaggccactctcatggctgtacacccttggcttctgcacccactcggagtgatagcttcatgatggtgaagtcacccagtgcacctatggcaggggagcctgttcgcccaagctgcccaccctctgatcttctctatgggctagaggtgagacctttgcaggctcaacaaatgcttgagggttattctgatccaggcatatggctaggccatgtcctagagagtactggcctctcagtaagtgcccatagtgatgtcaccatttttgtaagaggtaactatgtggtagacgctgtgctttgtaactgtttcgtgaattaaccagagttgtcacagtttagcattgggggcgggtcatgcctatatctgagtaagaaatgaaagtaattggtgatcaagagccaggctgttgtggaagcatgatgatggaatgtgggagcacaggaggctacagtgcacagggtacagtgcaccaggcagtcacttggacaaaggtggctgttttctctactcttcctgaaagaggggatcagattctgaagtaccttaactctaggttaccatttcccaagggattgaggggaaataaaatctttgtctcccagtatctagtacactgtgaagggacctctctatttgaaacatagagacagcagaaagaggagagaactaaaggaatagagaggcacgcatcagagtggtggcatagatcttttggtctgggtcttaggactcatatcaagtccctactggggatttgaactagatgcggtaaattggaaggttggggcgggttggtcatcacctttggaaaaaacagtaagtgaaatcacttatgtcagaaaactggtttacagttggctgattcatagaaacagccaccctgtgcatctttaagttgagttctcctgaatttggtgaaaccatgaaacctagaagccaagccatccatgcttggcctctgaccaccctcctgggtgacctgattcagccccagaaatgttcccctacccaaaaactgtaacactcattccacatttggggtctggggtgtcagaaaagctaagtcccatgtcagctgacattgagatttccgcaaagcattgctggagagtcagggcaagactttacaaggttcttactaatcttttctctcaccttagcagcattcagcaggatgggggagggtgggggaatacatgggctttgcctctcccagaaggacaagattttgctggttcaagcaaagtggtggaagcttctgaagtcatgcaggaagttgctgggacagaacgctgaggagttttgtatcactttgtcttccctgttgagtaccatctgagctgtcaaactttgctgccaagggggctgaatcaacctgcagcacgaagtgagtggggaggtaggaagcttctgtgacacagatttgcagcctgtgttcccaaggtttccaggattgaggaaactccataattggttgagagcacacagactttttggccaatcagactcagagctgaggtgggagatctgctcttccagcccgcctctcctcctccagctccccagctccactcaaattcagctcccctcccccctgcccacccccgccactcggtgactaagaactgctgcaagcaggcaaacctccgagcagtttttaagaggctggaaggagacataagagacttcagctgctgcattccaagccctgggtctaccttggagacaggacagcacagacttactctccacaaagggacttctgggtcatggggcccaagacactcccacagctcgctgggaaatggcaagtgctgtgcatgttgtccttgtgctgctggggctgggtgtctgggcagcttcgttactcagtggtggaggagtctgagccggggacgctggtggggaatgttgctcaggatctgggcttaaagatgacagatctgttgagccggcggctgcaattgggctctgaggagaatgggcgctatttttccctgagcttgatgagtggtgccctggcagtgaatcaaaagattgaccgagaaagcctatgtggagccagcaccagctgcctgctgccagtgcaggtggtgactgaacaccccctggagctaatccgtgtagaggtagagatcctggatctcaatgacaactctcctagctttgccacccctgagcgagagatgcgcatctcagaatcagcagcatctggggcacgattcccactggacagtgcccaggatccggatgtgggcaccaatactgtgagcttttacactctaagccccaacagccacttctctctgaatgtgaagaccctaaaagatgggaagccattcccagagctggtgctagagcagcagctggatcgtgaagcccaggcaagacatcagctggtgcttactgctgtggatggggggaccccagcccgctcagggaccacccttatctctgtcatcgtgctggacatcaatgataatgctccaaccttccaatcctcagttctacgtgtgggaatcccagagaatgcacccattggtactctgctgctccgcctcaatgccactgatccagacgagggcaccaacggccaactagactattcttttggagaccacacatctgaggcagtgcggaacctctttggcctagaccctagcagtggggcaatccatgtgttgggtcccatagactttgaggagtcacgtttctatgaaattcatgcaagagcccgtgaccagggacagcctgccatggagggccactgtgtgattcaagtggatgtgggggatgtcaatgacaatgccccagaggtgctattggcctctttggccaaccctgtcctagagagcacaccagtgggcacagtagtggggttgtttaatgtgcgagaccgggactcaggtagaaatggtgaagtgagccttgatatctctccggacctgccatttcagattaagccttctgagaaccactactcgctgctaaccagccagcctttggaccgggaggccacatcccactatatcatcgagctgctggccagcgatgctggttcaccttccctacacaaacatctcaccatcaggctcaacatttcagatgtcaatgacaatgcaccccgcttcaaccagcagctttacactgcttacatcctagaaaaccggcctccgggctcccttctttgcactgtggctgcctcagatccagacactggggataatgcccgcctcacctactccattgtaggaaatcaggttcagggagccccagcctcctcctttgtgtatgtcaacccagaggatggacggatctttgcccagcgtacctttgactatgaattgctgcagatgctgcagattgtggtgggggttcgagactccggctctcccccattgcatgccaacacatctctgcatgtgtttgtcctagacgagaatgataatgccccagctgtgctgcacccacggccagactgggaacactcagccccccagcgtctccctcgctctgctcctcctggctccttggtcaccaaggtgacagccgtggatgctgatgcaggccacaatgcgtggctctcctactcactgttgccacagtccacagccccaggactgttcctcgtgtctacacacactggtgaggtgcgcacagcccgggccttactggaggatgactctgacacccagcaggtggtggtcctggtgagggacaatggtgacccttcactctcctccacagccacagtgctgctggttctggaggatgaggaccctgaggaaatgcccaaatccagtgacttcctcatacaccctcctgagcgttcagaccttaccctttacctcattgtggctctagcgaccgtcagtctcttatccctagtcaccttcacctttctgtcagcgaagtgccttcagggaaacgcagacggggacgggggtggagggcagtgctgcaggcgccaggactcaccctccccggacttctataagcagtccagccccaacctgcaggtgagctcggacggcacgctcaagtacatggaggtgacgctgcggcccacagactcgcagagccactgctacaggacgtgcttttcaccggcctcggacggcagtgacttcacttttctaagacccctcagcgttcagcagcccacagctctggcgctggagcctgacgccatccggtcccgctctaatacgctgcgggagcggagccaggtgaggggctcggcgccgccccgggcgacccctgggggcggcactggagaagccgcccgtcctcataagggattgaacttgcatccactcctctccggccggcttggtcgctggctgcgctccacccgattctcgggatcattggaccgtttgcgcgaaaccagagtggccgattaagggatggggctccgagcaccgggggtggtggcgactgtgggcgaggggaggtgggaccgacccccacccctacactcaaaaaaggccggggcctccttcgagcttccggtgaatttcgggcgatttccgcgggtgtcgggggtcccgggaggaggcagtcacagatccacccctgcagccagcctcctaggcgccggctccggcacgcttcgccggtctgtagatttcctcttcgatttctccccagctcccagcatctgtgacttcactgttaccctccctatccccgcatcacccaaccgcacctgtctgcgggacttaggtgtgcgcgcggggctcatgcgtgtcctccctgctggccacccccacggcccacacaagttgcacgggctcgccacgccccgccaacacgtgcgcggacgcacgcacgcactcctcgcacgtgggcttacgcgaataccagctttcactgccactcgctcgcggccagattcacaggcctgttccggtccactcgcagctcccctctgccgctccctccgccgggctcaggagtactcgtagctgattgtgcgcgcctgagggtcccagatcgcggccgcccaggaccaggcgaggactccggagcctcctctcacctctcccacctgcgccccgggctgggccgggtcgcctggggggcggcctgagcgaggcgcggggccaggagcgctggagcgactgccgctctaagtgccgggcgggcaggactctacgatccttgggccagaggtccggatggtcccgggactccgtctcaagggtcggcgacccctcaacccagaagcctcgagcaggcggacaggcagagctgcccagtggccgaggcgcggcagggctccgcgttgggcgagtgagtgagcctctataggacagcaggactgggactccagtggcaccagcggccccttcctcccgcaggaagtgaaagcctcgagcgccctggctctcaacccccagagatacaggcttttggcgccgtcgtgatcacaatgtgcccagcgatctagggtcagagatttggaggtgaccaaactatctgacactctaacaagtcctgtctcctctggcagatggaaagctataggctctgccagatgccagggtgcccttatgtgtgaggaaactacaatagtaaaaaacacaagtttctccaactccaggagcttttattcaaaatatatcaatgcctaactctgctcctaggactgtattttgaaacacccccaggtgattttgatagctgattgagagaaacttactatataactcctttgagaacctcatctcatttgctcttcccaccattgctgttggctaggtactaacatgcctctcttataacagcttcacagaggtcaagtgacttgctcaagttcacagagcaagtaagagagattctaacccctgtctaactccagaatgtgtgcttttaatttcttggcacttggaactttaaaagcttgaggacaggagaggggagttgcctctgctgggattttgcttctgctgggatggggcaagggtggggttccttcccttttaggaccttacatgtggggaaagtcttctgtggctcctcatttctgagcagtccccgcagcgcaaacttggccagttatccttttggagattgagttcccccagctccgtttcctcctatcacaatcactgcatttccatgtagattctgctgtgtctaagaatacagtggctgagggctggccatccctgtgcccttctccatggcagccccagaatggtgctggtgactcccgatacacctggaatgctaggtttctgggttctgctcatatcactgccacctgtgagccttgagtgagccactggcagttccggagcttccttctccctggagtaatctgagatactcacactctctgcttctgggagcaagtatgagtattaattaccagcccaccccagaaccagtgaggaggtggctctaggagtgctccatgagagtgtgtgatgggataacacaccccctggaaagaccagaagggactcaggaatgaagtggctggccagagccccacaccttcagctaggtgggagatggctacacatcagccccttgggagccctggagacttagttggccctgcttggaggctgtgggagctggatccctccccgctgcatcccttccatttttctccgtctcagacagagcagccttgttctcttctccttagtcacagaccattgtctggcacggagttctaggggtgagaagtgtcccgggacttggatgccccgcaaaggcccaatctggcatgactcctaaattaataatgtatttagctgtgggaagagattcttgcaagccaagggcccagagaagatgtccctgtgaatgtgtcactgcacaacctggcaccaaaagggttaccaagaacagcagccatcttgctgcagaggatgctttgttcccagctgaggagttgaataaattcattctagggctggtagaattctcattgaaaagcctcctttgccactttagggggctttgtctgcacctcttcccccagttccacagaagatgccttcagtccttgaattttggctcaggagttctgactctgggggcagggaggaaggggccatttctttaggaaaggagtctcagcttgctcactgtggtcagatgaaatgtgatttatctcttggtttctggtacctcagacctctgagacctgaggtgtattttgtctttggagatgagtccacccctgccccctcttagtccgttttcttctctgtgcccactcccctccttctctcccggcccatccctaggggctcgggtgacattctaacttctcacgggtactcagcccctttccctctgttttctccacagcaagccccgcccaacacggactggcgtttctctcaggcccagagacccggcaccagcgggtaggtgactgattctccagcccaccctcttctctgcggcattttctcagggatgacgtgggaggagatgggggagggcccagcatttgctacagatggcttctccctcagtttgagatcccagggaggtcttggtgtgcggggggctggcacacagaccccggaaggaagaggcgactgccctgactgttcaggaagctcaattcacatgcttgccccttccctcctcgccacgaccggcaccttttcctatcccctgagggcactgtggaaccaaaggatggtcttaagctggtctctgggtgaaagcgaggctttctatgcccatgtactgcctaaccccctcccctgagttgagctgggctccattatgacctggggctcaggcagaaaagcatttgaccggaggaggcggtccgcactcagcgcctcctccagagcctccagagccgaggctgactgcagcctggggagagtggaggcagcacagctggaggtggaactgaggaaggactgggcggggcatggagcaggcccccttctccggcccctcctcccactgtcctctgcccctacttgtcctgctctctgtctgtggggtctccgtgtctctgcccctttttcttgagtttccgtctttgccactttctcttacctctcagtccttccctcagtctctatctcgctttgcaatctctgcctctccctctcttctccatctctgtcttagcttccgtcttgattgctgcacctcagcctcagtccctttcatttgtctacttgcattgatctgtgccgcccactgtgcctgccatggcataagtgctcaataaatgtggagtgagtaactacacgggacccttagtctctttctccttctctatctctgcctccctgtccttgtcctggacctcttttctgtttctcctttcaccgtttcctagcgccttgtgttcttctatccccagcctctatgtttctctgtctctcactatttctgctttcctctctgttctttgtctctctttgtctctgtctctgtatatctttctttgtctctgtctctggtctctgtgcctgttgtctttttctgcctctttctctgttactctttctttatctctctttttcttttatcttgtcttttttctctgagcctctgtctctgtctctcatttttttgtgcttgtgggcaagccagcacacacaaccccccacccaccacccaccaacaccccgctctcttccttccctgcccctcacacactgagcctttgatcgcagctctccaccagacaccctcccatccaagcagccccagctgctcatttcaatctggtatgaattcctgctgagacaggaaccccctgcgggctgaaggggagggaaacttcagcagaaagaccttcagttggtctgagcagagtgggataggctctgcgccaggcctcccagttagaagtcaggagcctggaggagtctcagagcccagggagagaagcaggagcttgggccaccttaccctacctcctcaatggttgagtacttgctgtccacatttgccaagttgctacagatgctgagcttccaagagttatctttcccccatcctgcaaccaaccaaacccttgttgccacaaggacccaggagcccttggtgtatggcagagattccagcttctgggcatgcacagtcctgtcacccattttaggaacgcaaagcgcttcttagaaggcccctaaaaagcagcagatcaaaaggcttgggctgcccttgcccttcctttgaccccagctgttgtccttctccctgctggccttgccaaccttctcataagttatccattaagtcattaatgtattcattcgttcatttattcaacaaatatttatcgagcatctactatgagcagggccctgtgctaaacattgggctataggagtgaacaagtagatgtgatcccagaactcataggcttccagaccagcagaggagactgaaaatttgcaacaagtaacacttaaaaaaaaaaaaaaaggctgggcactgtggttcacgcctgtaatcccagcactttgggaggccaaggtgggtagatcacttgaggtcaggggtttgagaccagcctggcagccaacatggtgaaaccccatctcgattaaaaatacaaaaattagccaggcgtggtggcaggcacctgtaatcccagcgacttaggaggctgaggcagaactgcttgaacccggaaggcagaggttgcagtgagctgagatcacgaaaaaaaaataatctagccacaaatcacagtaagttctgagaggcagagaacaatgtgagtgtaatgggggggggaagatcagagaaggcttctaggaggaggtgacattgagaagttctaggccatttatgttccctctacctaccaccaccccaggccatacactggctttgaagcagaattcaccattgaacctggaagccccaccaactgcctctcatgtgtcctctggggtgagcaccttacccctgcctcaactcccattccatcaaatgagaggcttagtggcctggaatacatgtgggagctcttggagatatggaggagaaggtgcggaacctctctctctctcctctctctgcttccttagttaacttgtggaggatgcaacaaaccttttttttttttttttttagacagagtcttgctctgttgcccaagctggagtgcagtggtgcgatcttggctcactgcaacctctgcctgccaggttcaagcgattctcctgcctcagcctcccgagtagctgggacagcaggtgtgcaccaccacacccagctcatttttgtatttttagtagagatgggtttcgccacgttggccaggctggtttcaaactccccgacctcaactgatccacctgcttcagcttcccaaagtgctagaattacaggtgtgatcgcccccggccacaacaaacatttttgattcagcggctccaaagtgaaataagcgttaggatctagtccagtaacttcaacttctctccttcattcattcaacaaatggtcagtgagcactttctgttggccaggcagtgttctcgatgtgggaggcccctgccctcaaggagtttacagtgcactgaaggagacaaatattgaccaaataattacaaaaataaatgtgagactgaaactgtcataagtgctaggtagaattgtatctggtggtgtgggcgtataatagggatttgatttagggagcaggaggacatcctggaaatgaagttgtgctgagatctgaaagacaaatacaaattaaccagctaaagaaaagaaggaagagcattccagatggtcaggcataccagcttcaaagcagggctggtgttgagttcttcagtaaacttggttcaagatcaagccagctctgggtcacactgcctacacagaaggaagagcattccaaatgggaaaagcctatgcaaaagccttgtggtgaggcctcctgggatcaagggaatggcagggagttttctctttgctggcactggagtgaggggatgaagaggagaggttccttttatccagtctaaccctggttccagccttctgttgatgccctgcctcactccctccccaccatcttgcccactgccctccagcctggtctggtcagacacaccagcttcaaagcagggctagtattgagttcttcagtaaacttggttcaagttcaagtcagcactgggtcacactgcctagacagaaggaagaagacctggccaggtgtggtggctcacgcctgtaatcccagcactttgggaggctgaggtgggtggatcacctgaggtcaggagtttgagaccagcctggccaacatgatgaaaccccatctctagtaaaaatacaaaatattagccaggtgtggtggtgcacacctgtagtcccagctactcaggaggctgaggcaggggaatcgcttgaacccaggaggcggaggttgcagtgagctgagatcacaccactgcactccagtctgggtgacagagcgagactccatcaggaaagaaagaaagaaaaagagagagagggagggagggagggaaggaaggaaggaaggaaggaaggaaggaaggaaggaaggaaggaaggaaggaagaaaagaaagaaaaagggagaaaaaatgaagaagacttacattctgaagttcctgcttggcacatgcttctcctccccaccactatcccttctcaggtcatcctttgggtgtctgatcccaatagctgttgtctcaagctctgagcccagcaaaccatttcccccttcttaggctgtaacccaggccctgccctgcagctgtccccagcctctgcacaaagagtctccatttggtccctagactgttctctgatggctccacactaccatccctcctctgagagacagtatccctgctctctctcagtttgggcagtcattcaacaaacaaatagcaacttaatttttttccacttataaaatagtacatgctcattatagaaacatgaaaaatagaaaaaaaattaaaaggaaaaccacccatcattttacaatctagggagaaccaccaccaactacagtttaatatgaaacatttcaaatatgtacaaaagtagagagaatggtgtcatgaacctgtatgataccactatccagcttcaactaatgccttatcttgtttcacctatatccctacccttatcctgtccttggattcttttgaagcaaatctcagacatcatataatttcatcttggtctccaccatctttaacagatgacttttttttttttttttttttttggagacagagtctcactctcttgcccaggctgtggcacaatctcagctcactgcagccttcgcctcccgggttcaagcaattctcatgcttcagcctcctaagtagctaggattacaggtgtgcaccaccacacacagctaatattttgtattttcagtacaaacagggtttcgccatgttggccaggctggtcttgaactcctggcctcaagtgatccaccctcctcggcctcccaaaatgttgggattacaggtgtgagccaccttgcccggccagatgattctttcataaggtccacattttatatttgagtgagtgtctcttaagtatcttaatgctcttttaatgtaaaagacttcccctccatcttccatttttgcaatttatttgttgaatccctgccttttcatatatatctttctaaacttttctttgtgtaatcaaagaacatgcatgagcttcatttttatttttatttatttatttatttatttatttatttatttatttattgatacgtagccttgctctgtcacccaggctggactgcagtggcgcaatctcggctcactgcaagctccgcctcccaggttcacgccatgctcctgcctcagcctccagaatagctgggactacaggcgcccactaccacgcccggctaattattttgtatttttagtagagacggggtttcaccgtgttagccaggatggtctcgatctcctgacctcgtgatccgcccgcctcggcctcccaaagtgctgggattacaggcgtgagccaccgcgcctggccgagcttcattttaaaaaaatctcattcacctaaataagttgttcacaaacttgtcacactttcatgtgacactttattcacatattaagaactgttattcccagtcatacggtacatttcctactagttttttaaaaatagcaactgaggccatactgtccaacagaattatagcttttttcttctttgcagtgtatcatgagaatttccccatgtctttcaaaattcttcccaagtcatttgcagagtaactcctcttatgaatatacatattattttacagaataagtcctcatatgaatatacatattatttttctaatgctaatgggcttttgctacattagaaaacatacacattcatttacaattttttttttttgagacagtctcgctctgtctccaggctggggtgcagtggcgccatctcggctcactgcaagctccacctcctgggttcaagcaattctcctgcctcagcctcctgagtagctgggactacaggcacgcgccaccacgcccagctaatttttgtatttttagtagagacggggtttcaccatgttgaccaggatggtctcaatctcttgacctcgtgatccgcctgcctcagcctccctaagtgctgggattacaggtgggagccaccatccccagcctcatttacattttaacacaattaaattcagggtgttgtcagggtgacttcctagatttctcagttttttgagcatgatgtagggagtattttattatagtccagtctatgggatattcccttatacacacacacacacacacacacacacacacacacacacacacaccccaaactcaatagggcaagaaccatattcatcatctcttaaatcctaggtcctgtcacaggccactgcttggaaaatagttgactaaatgtagtccatttcttccatttttacttttcactattccccaaatcctggaagagtccctcatatctgctgctggggctccaaggcctccaagctgaagcccagtacgttgttgtgcataagatcataggccctggaatcatattaggctggctttcaggttgcaactctaccagttccagctgtgtgactctggtatagtctctcaacctctctgagccctgttttcatctgttggaaaatatagataatcacaacacttatctgcagggtgattccgaggataaaaaagacaaatatattacccagtcagcttagaataggaagctctcagtaaatggttaaaaaagaggtctctctccctctgctcatctcttacccagcttcacataattggcagcccacccacctgtttggccctcaaccttcaaccatttcccaggacgcctccttacactcctgatcatcatggttccaaccccactgttccactcagctttgttccctcaacaccactgctccctgtgacaggtcatcctcctaacctctggcatctggtcccgttgtctccctgacaacccgcatgctctcctccctgcaacccccgccgcttgcctgctctccctactttattcccattagcccccttcacctggggctgagaacacctggccttgaccctgcaccctcagccaggcccacagagctcagtcgggccggaagtaaggaccccagatattcagttgaggaatttaacattaatacaataatatagaatccaccagcagattttcataaatgttctgtgtgttcttttatccttttttttaatccaggattttatcaaggagcatagattgcatttggttgtcacgtctttcctctcctttaatctggagccagctcccagtctttttatttttttaatgacatggatatttttaaagagtccaggccagttgtactttaaaatgtccccgaacctggatttgctggctattctctgatggttagattcagattacacaccttggtaggaatacttcccgcagcatcacactgggactcatctaacgtcggcctgtcccactatcagtgatgccgagtttgttcgtgtggtaaaaacagtgtcccagatctctccattataaaaatatatttttataaagatattttaaaatatttgtgaaaatataagtaatctgtggatgatactttgagataggcagcaacccttcatgcaattttagtattccctgatgatccttgcctgtatctgtttttacatcagtgattacaaagcggtgatgttctgtcattccttctacatgtatttgctggtattcttctgaaaattacctggatgatttcttcagatttaaattcactgtcttttccttggggaagcctggactggctgagctgcctaaccctgactctctgtcttttttttttttttgacagggagtctagctctgttgccaggctggagtgcagtggcaaccttcacctcctgggttcaagcgattctcctgcctcagcctcccaagtagctgggattacaggcgtgtgccaccatgcccggttaattttttttttttaatatctattttagttgagacagggtttcaccatgttggtcagaatggtctcgatctcctgacctcgtggtctgcccgcccctgcctctcttcataccctctggtagcccctgacacagcccatggcaagtatcacaattgcaattactctattgtgtaattatttaaaatcagcctctcagtgcccaccatgagcaccgtaaagatggacagtttctatcatactcacagccacaaccccagcacctggctctgtgtctggtacatagaaattgctcaagaaagaattgttggaggggcgcggtggctcacgcctgtaattccagcactttgggaagcggaggcaggtggatcatgaggtcaggagttcgaaaccaacctggccaatatggtgaaaccccatctctactaaaaatacaaaaattcgctgggcatggtggcatgtgtgcacttgtcgtcccagctgctcaagaggctgaggcaggagaatcacttgaacctgggaggcagaggttgcagtgagccgagatcgcgccactgtactccagcctgggtgacagagcgagactccagctcaaaaaaaaaaaaaaaagaaaaaagaaaagaaataattattgaatcaatggaaacagaattacaactcttcccacttttgggaaggagaattgagattcctgctttccccttcaaccctagctttatgtttgttgtgatggtatagaggtcacacatggcagccttgtgtctgttcttaggctgagttcatctacttagggacggggaatcccagattgggcaaaaccaaaagcagggacagaccttggaaaaattgtaaagcagttcttggttgtgctcacccaccatgacaaaatatgcacacacacaacgcaacacacacacagacattttcatgccttcaaggcctaccctacagcctttcccatggtgccaaacccttcttcttaccttacagtcacttaactgtctctgctggtctcttcccactcatttaggcaacaaatatttattgaaaaacttctctgagccagatggtgccaaacagttacctaaagggcagactgtgtgtgtgccagggctgtttcccgccaacactcccctgcaaattgaaataatttcatccttggaaattcaaaaaaatcatgaaaattgtcactgtgggaaaattccaagtagagctgaaccttctaagaagcagagagttcttcttatggtttagtatttttttaaattatgaatcatttcatgttttttcaacactcggagtttctaaaagtctcacttaggtccaagtgctaggctttgtgctaggtgcttcagtaggaagcaggtggagtcgctgcctcacagaagccagtgtggtggaggaacagacaggcactacaacagctgcagtgtgactagtgccatgtggggcagccgctgggatgggagtacagtggaggcacctgcccagtctgagtggatctcctctgatatattttattcgtgtcatcatggcaaatgttgggggactggcattctagggaacaccatctgcccaggattcacagcaagagggaacttgagggataggaaagtgcaccttggaaaaggtttgatgatagagtgtttgagggcggggggtgggggttcttgtaaaataggaggggcaggttcttctatggccgtggattttactctgagggcttaggaagccattgaattttagaaatttcttctccctgctccagggtctcttggggcctcctacatctccccctaggtacctcctaggtccccactttttctctagctctggaacattctcttccatttcccaccttcacagtcctctggagaaggtctgatctccctcactatgacaggaagccaggctctctcatggtgggtgggggaatgcactatgttcaatgcattggaccagcctggccaacatggtgaaaccccgtctgtactaaaaatacaaaaattagcctggcacagtggcaggtgcctgtcatcccagctacttgggagactgaggcaggagaatcgcttgaacccaggaggtggatgttgcaatgagccaagatcgcgccactgcactccagcctggatgacagagtaagaccctgtctaaaacaaaaagaaaaaagcatcggaggcagcaaagagctggtttgagggactgacttgtgggattctggcttctgaaggattgtagaagtgcctcctaccttgctgagagaaacaggtcttgggcatggggtagggttagggtactaggtttgggagccctgggagaggacaggaggggcatgagctgtgccggcctgggagtctgtgctcaccatcctactctctccccagctcccaaaatggcgatgacaccggcacctggcccaacaaccagtttgacacagagatgctgcaagccatgatcttggcgtccgccagtggtaagtggtgtcagtgtgtgtatggaagagtgggagacctggggttctggggtgcatctcacagccaccatgcccacggactggatgtcaaacctgtgtagtttctccagatctttcggcaggtctgaaaggacccacaattccaaacataaagcctggaattgtggctaaggaacagcagaggggttgggggtcctgggatgcctggaggagagcgaacaaggaaaagactcatggagggaatagtggttacaagtctagctctggaatgggacagtgtagctcaggtcctagctctgctactatccttgggacttggatcgacttgctcaatctctctaaacctcagtttcctcagcctagaaagtggggacagggaccccaaagggttgttgtagagattaaatgagatgataccacaaagcatagagttctgggcctggcgcttggaagccctcaagcaatgaaagtgggtgtagaaatccccagccgagagaacacctcctctttatgcgaggctcctcttttgctgcccctaactccagagtaggattctggttttcccataaggttgactaagggcttcctttgtaatagagattcggctagtggtggttgtccctgaagagtcactagggcccagagcaggagaagaagaatatcatttgtccttaagagcacagcctaagctgggcgtggtggctcacgcctgtaatcccagcactttgggaagctgaggcaggaggatcatgaggtcaggagttcgaaaccggcctggccaacatagtgaaaccctgtctctactaaaaatacaaaaattagctgggcatggtggtgcgtgcctgtagtcccagctacttgggaggctgaggcaggagaatcgcttgaacctgggaggtggctgtggtgagcagaaaatcgcaccactgcactccagcctgggcaacagtctcgctctgtctcaaaaaaaaaaaaaaaaaaaaagagcacaggctttagaggcaggccaatctggattcaaatcctggcacctggcaccaccacttagcaatgagtccttaggtaagttattaaaccccctcggtttcacttactattaatgggcacagtattaacggatctcattgtggtgttaccagggccaaatgcaagtccctcagcacaggattggcagagagtaagggcacaatatattattatctttgctgacccaaacccgttttttactgggtagaaagcagaattagaataatgcctattaataaagactagcttctggagcagcaaatcctgggcttataaggaggctggcagaggatcaaggcattgccctatatcatgaactgatagccctgccctccagcatgtctggaggactggtgggtagagaaccaggtgaaatcacaagaagcactgtcatcacacctgggcacatactaaacaaactttaggggcctcctgtcaatgaatcctctcaatagctctgcaaggcaggtctgatttctcacactcgacagatgagagaaccgagaaggcacttgccccagggtcctcagttttgagctgccaagctgaggttctaacctggctcaactcctaagtttatgctctttctactatagggaccatggctgcctttggatccagcctcggcttctctattacctgagcaggatgagaggctgtcctcttcctcgagctctgctttattcttccagatcagggttgccagataaaatacaggatgcccagttacagttgaatgtcagataaacagcaagtactatttcagcataagtcagtctcaaatgttgcatgagacataatgtactaaaaaaaaaaatgctcattgtttacctgaaattcaaatttaactgggagccctgtacttttatttactaaatctggcaactctaccccagatgtctgtgaggttaagtggggccaggcctacagctgacggaaggacagagagagaggtggcagggactgctggcctcctgaggcagagctgtcccaggtctggtggggctatgattccagagaggccagagactgagtatgaaagtggcaggcggctgggtctgaggagatgccaagttggcctcttgagggaaataaacaggtatatttagctgttgtggccttgcgccctgaggccaggaagcagctttttagcctaaatccagatgttaaaaacagaaatgaaatcagtatttatggccccaaaccctccaagcaagtcatgcagctcgttcccctgtcaaggcctcccacctttggcccacacagggcctgaccctcgtctaagcctgcgccctggggaacggaccctgggggtggaggtggtgggtcaggccctgctctcactttcacacccgcttcctagccctgaaaccagagaggttcctgaagtccagcccagccaggcctgtggggctgctgagaggggttaagtaagagggagagtaaaaaccgacacttgggaggaggcttttaaaataaacatctgcggggagggatgctctcaaggaggctgcggtttgcagctcagccagctgtgttccagctaatcagcctccttgggctactctggagttgctgccttggccctgggatggggtaggttaagaggacagagggaggtcagggagctgggggctgagtttccctgagtagaggctggcacaggagagaaggcatcacccccacctcgtccaggccagaagatgtccagcttcttgaggctctcctaagtctgcctctcctgggaccaagagaaaatcccggtccttgaccaaggtgggccttggggggagtggggtgtagagggaggggcactggagaactgactctacagaaagtcaaagctggcaatccaacttcttcccctcagatttatagatgggaaaacaggcttgagccacgcagagacttgaccaagctcacacagttccttagtggcagagcagagcaaatattctctttcttttacattctggatttccatatcttctctccctcctggtccagcccaacctcagggcaccccccacgaggtgggcgggggatggctttgtcacttgcacccactcggggtgctactcagagatcttgggtgcacataggacgtgggtgggccgagcttctagctactccgtcaggcccttcctgtcattctgtctctgcctcccttctccctgcttctccgtgttcctcctcattcttttctgtgtgcagggagactacaccccccaccccgctctttctctggcgcctctgaggtcccccctctagcccctaaatcactctggaatcctggctctttgaagccagatctgggcccccctcccctaccccttccattcccaggctgggaaaggctgaagaggctgacggctggaggggagggggcggggcggtggcggatctggcttccttttggagttaattagggaaaacagagaaatgtcagcggaatgaaagggctgggggtgggggccagctggggtaggagaggaggaagtgggcagctgctccctcccactcaacccctctcccccgcccccagaaagctctcagctccggggatttgcgacatgaaatgggggctgtagaaacctgagcgctggtgcgtgaagagaaaaaccgaggcgcatcccggctctcccctcccgtgtgccctcctcctcttatgccggcttgaaaatatttcctgtctctctatttctcaatccctggttgatgtcccaggattactcagcctctccggctttagtcactctcgctacccgctcccagggtccagggtggaggcagagggaggctgggagagaagctctactgccagctgggcctgggctggcctgggcatccctgaggttttaactgtctcctaaccacagaggatctcagggcctccagcagcgagccccaatgagtcaaactcttgtttcctcctctcccacccccgacccagtcagggcaggtgaggggtagaggtgatggcatgctggatgtgacggtgttgatgatgtattgcacaggatgaagcaccatctcatttagtcctcacagcagccttcacagtgcgtacaaatcagctggcaattccgagaggctgcattctaaacaagttcctgggtgatgctgagccagggccagagtgtggacttctctgggccccagtttcttcttctgtacagtgggacgttggactggaggtgctgtctgatgtcacctagctgtggcactctgagcctgtgcctaaagtgtccctgagatgtctagtccccgagatcatcatctcctcagcttcatagagccgagctcttctccatcttctctctacctcccattcactcagaacagggataaggtccaagctgctggtggtgatggtgactgactgtcccttccagcatgcgcttaggtacacttgggcctgaatgcccctctaacaaatgctaccgggtatggccttggtccttctaacacttggttccctcatctgtaaaatgagggtcataccacatagctggctgggctgttatgtagaggttaaaagtgattgtgcatgtgaagcatccagcagagtgcctggcacacagtaggtgctcaaatgctgttttgaaatacaaaaattagctgggctagtggtgtgcacctgtaatctcagctactcaggaggttgaggcaggagaatcacttgagcccaggaggcagaggttgcagtgagccgggatcgcgccactgcactccaggctgggcgacagagcaggactccatcttaaaaaaaaaaaaaaaaaaatgctgttttgaaatggaggcttggaagagcactcttcacccccaccccacacacttactaacggaactaccgaatctctactcgtgccaggccttgcttggcaaaggctaggggcatgtaaagccatggtttcatggctgctgccctccaggagcccatggtctagtgtgggagtcagaggctcccttgagaaagccagggcaaggaactgagagcccgtgtcacagccctgagagaaataccagcgaatgtgttttgagcacttacatctaccaggcactattttacgtacctgacatacattttcttatttagcattcactaaaaccagaagaggtggttaccattatcatccccattttgcagatgagaaaactgaagtggcataaggaggttaggtagacttgcccaggatcacagtgagtaaggaaaggagctaggaatcaaacctagactttctcactccagagcctcttaacctctaccctcaactcttgtgaagagagactaccttggtgacccctatattcccagtgctcagcgtggtcaaggcccagggtgctgtataggcattcattaactgctggggatataagacagtgactgttgaggaccctaagtttagctcccacctgatcttcctctgtctctgcagaagctgctgatgggagctccaccctgggagggggtgccggcaccatgggattgagcgcccgctacggaccccagttcaccctgcagcacgtgcccgactaccgccagaatgtctacatcccaggcagcaatgccacactgaccaacgcagctggcaagcgggatggcaaggccccagcaggtggcaatggcaacaagaagaagtcgggcaagaaggagaagaagtaacatggaggccaggccaagagccacagggcggcctctccccaaccagcccagcttctccttacctgcacccaggcctcagagtttcagggctaacccccagaatactggtaggggccaaggccatgctccccttgggaaacagaaacaagtgcccagtcagcacctaccccttcccccccagggggttgaatatgcaaaagcagttccgctgggaacccccatccaatcaactgctgtacccatgggggtagtggggttactgtagacaccaagaaccatttgccacaccccgtttagttacagctgaactcctccatcttccaaatcaatcaggcccatccatcccatgcctccctcctccccaccccactccaacagttcctctttcccgagtaaggtggttggggtgttgaagtaccaagtaacctacaagcctcctagttctgaaaagttggaagggcatcatgacctcttggcctctcctttgattctcaatcttcccccaaagcatggtttggtgccagccccttcacctccttccagagcccaagatcaatgctcaagttttggaggacatgatcaccatccccatggtactgatgcttgctggatttagggagggcattttgctaccaagcctcttcccaacgccctggggaccagtcttctgttttgtttttcattgtttgacgtttccactgcatgccttgacttcccccacctcctcctcaaacaagagactccactgcatgttccaagacagtatggggtggtaagataaggaagggaagtgtgtggatgtggatggtgggggcatggacaaagcttgacacatcaagttatcaaggccttggaggaggctctgtatgtcctcaggggactgacaacatcctccagattccagccataaaccaataactaggctggacccttcccactacataatagggctcagcccaggcagccagctttgggctgagctaacaggaccaatggattaaactggcatttcagtccaaggaagctcgaagcaggtttaggaccaggtccccttgagaggtcagaggggcctctgtgggtgctgggtactccagaggtgccactggtggaagggtcagcggagccccagcaggaagggtgggccagccaggccattcttagtccctgggttggggaggcagggagctagggcagggaccaaatgaacagaaagtctcagcccaggatggggcttcttcaacagggcccctgccctcctgaagcctcagtccttcaccttgccaggtgccgtttctcttccgtgaaggccactgcccaggtccccagtgcgccccctagtggccatagcctggttaaagttccccagtgcctccttgtgcatagaccttcttctcccacccccttctgcccctgggtccccggccatccagcggggctgccagagaaccccagacctgcccttacagtagtgtagcgccccctccctctttcggctggtgtagaatagccagtagtgtagtgcggtgtgcttttacgtgatggcgggtgggcagcgggcggcgggctccgcgcagccgtctgtccttgatctgcccgcggcggcccgtgttgtgttttgtgctgtgtccacgcgctaaggcgaccccctcccccgtactgacttctcctataagcgcttctcttcgcatagtcacgtagctcccaccccaccctcttcctgtgtctcacgcaagttttatactctaatatttatatggctttttttcttcgacaaaaaaataataaaacgtttcttctgaaaagctgaacgtttctgtataagcgatggaagctcctggcatgtgtgcatgaagtgatgagctgaggtgggtgctggaagaagggcggaatcgggaggccactttgtgtcattgcgcgtctagatgtttccgaattgcgtgtgtgtgtgtgactgtgcaatatggttgtgtatgcttgcaatgccgttgtgcctatgagacagtgtgcgattgtgtgcctatggatctgtgtaccgtgtgccattgtgtgatcggtccgctgtgggggtggggatctgagtgcggcgtgtcagtgtgcagtggagtgtgcagtctaagcttgcggctgtctccaggcagaagaggagaccccggcgcgggcgggggcgggttggcgccgggcaaacgccttgggtagaggggagaggacgtttcgttagttcccgccccttcctgactaaaattgcctacccgaagcgccccggagggcttcacgggaggagggtagactctcctttgcccccgcacccccacccccgctgcctaggggttttgggaaagccgcgggagtgggagggaatgcgggaggtgattcttccaaagccaagtctgcagctcgagcctcagtttccccatctggaattcgccttcccgctgacatctccgtagcgaagcctaagaaattggagggctcatcctcttcttgcgggggtcaaggggactgaaaggacgtgcaggaaatgagatccatcgcagactcagctcccctccctccttcctgtcggtgcttttccactcactcgcctgctctcccatctccccgccccctccgcctgcctcctcgaagcactgtgggattccgaggttgctgcagccagagaagctgcagaaaaacacggagctgggggtgaagggggacttaaaaggggaactacccggaaggacccaagaacacaaagacagagccactgcggttatctggctggtcagcaagggtatgcggcttcctccgcgctgcggaggctcccagagccaggtcacccattctgccagctcaagtctgttgtcatgggaaccaaaccttccaacttaagaatctgggggcgactttctagcgtgggaggaagggtggtgtgcacggttgctgagatggaagcagggttttgttactcagagccaggctgcggaggggcggggtgccgggcgcctgggttctattccaggcacagcagcagactggcagagcgcgtgagcagctgtggtttgtcccctaattggtatgtgtgcctataaagctctgaaccagaaaggcgtggcctccggggggacgggagggaggcggcaggcaacccatccccacacctcaggccatactgaggaggcagctgcccaggctccagggctatttaaaaggcttttatttccagttccagagcccgcccgaatgggtttgtggtcctctccaggcctctccctgtctatcctgggcctgctcattgctggtctggcttttttgtgcaggtcataacg

SEQ ID NO: 443 - DNA, 177194 bp, Homo sapiens
  source 1..177194: mol_type = genomic DNA
tgaaaatagggacttcaacagatatttgtacacctatgtttatggcatcattagtcacaatagttgaaaagtggaagtaacccaagtgtccattgacagatgaatgggtaaataaaaagtggttcacacatacaatgggctgttatttagccttaaaaaggaagggaattctgttacatgctacaatatggacgaacttcaaagacatgatatcaagtgaaataaacctgttataaaatgacaaatactgtatgattcctcatatatgaagttcctagattagtcaaattcatagagaaaaaaggtagaatggtagttgccagggactgggtgaaaggcaatggggagttgctatttaataagtacagagtttcagttggggaggatgaaaaagttctggaagtggatggtggtaatggtcacaccagaatgtaatttgaatgtacttaatgtcacagaattgtatgcttgactatggtcaaaatggtaaagatgaaacaagagtaagaagacatccactgcattgtattttacacccttggaaaatgaatatcagaaaaagaacttgacaacctcaaacaattttgagtgactgattcctagtgtggtgaaaaaccccttccggctctagctttatcaaatagacctgctttctgtttctgtaatgttccatgctgtctcttaccttcaagcatttgttcagaggttctagaacacttcttcagcctttttcttgattcaatcctactttttatgattcagcttcaatcatgccctcaaaaagacttttctgaccccaaatctagactggatacccctcctaggtattcctccatcacccagtgtttcctacctcatatcacagcagttaccatactctattatactctctttactttcttatgtcctcctccaaccttcacgcttgagaccagggcctgtgtttatcatgttcaccatttctagctccagctgcaatcatgcaaagtgggaggcacatgtacccaattaagtgtctgatgattcaataatttaaaggcagattttgaaggtaaatgcaaagccatcaaccataaacgttcaaaatatataaccttagaagaaaacgtagctaacgtttcttaattgatcttactgcttctgattatacaataagagatggaagatgtttggagcaagggcagtggtggcattgattaatgccttgagcagtcaataatactttcctagcaactattatcaagatcatgttcatttataccattcttattaatcctgataaaaagattcctgttttgaaagatctaattctagggtatcttagagctgtaagattctttaaagcgccttgaaagtcaacaaaggcaaacaaacaagaagtaacttaggttttcctgagcaggtgcagaaattatttaggcctctgagcgtcgctgttgaccacctaaggagtaaaaggcagcgagacatccaatccagcaatacggctcccacagcacaagggggtggaggtttggccctaaagcttcaggacaccaaagaaattcagtcgaacagcccaccagttctctccatagggacctgggtcccgtgaatgctggttatctcacaccctgaggaataaagattggaatccgcactggatgctggaagttgactcggagaaaattgcgacaggagggaaatggcggctctgcaaaagttgccacactgcagaaagctggtcctgctgtgcttccttttggcgaccctgtgggaggccagggccgggcagattcgctattctgtgcgggaagagatcgacagaggctccttcgtaggcaacatcgccaaggacttgggtttggagcccctggcactggcagagcagggagtccgcatcgtctccagaggtaggtcccagctctttgctctgaacccgcgaagcggcagcttggtcactgcgaacaggatagaccgggaggagctctgcgctcagagcgcaccctgtctgttgaattttaacattctgctggaggataaattgactatttattcagtagaggtggaaataacagatattaacgataatgcccctcgctttggagtagaggaactggagctaaaaatcagtgaaaccactacgccaggattccggattcctcttaagaatgcgcatgatgcagacgtaggtgagaacgcccttcagaagtacgcactcaacccaaatgaccacttctccctggacgtgcgaaggggagctgatgggaacaagtacccagaactggtgctggagcgctctctggaccgcgaggaagaggctgttcaccacctcgttctcgtggcttctgatgggggtgacccagtgctatctggcacctcccgcatctgcgtgaaggtcctggatgcgaacgacaatgcgcctgtttttacacagcccgagtaccgcataagcattccggagaatacgctcgtgggcacccggatactcacggtgaccgccactgacgcagatgagggctactacgctcaagtggtatattttctagagaaaagccctggagaaacctcagaggtatttgagcttaagtcaacatctggagaactgacaatcataaaagatctagattatgaggatgctacattccatgaaattgatattgaagctcaggatggtccgggccttctaaccagagcgaaggttatcgtcacggttctggatgtgaatgacaatgccccagaattttacatgacatctgctactagctcagtttctgaagactctcttccaggaaccataattgggctttttaatgtacatgatagagactctgggcagaacgcattcaccacctgttcactccccgaggatcttccttttaagttagaaaagtcagtagacaattactaccgactggttacaaccagagcccttgacagggaacagttttccttttacaacatcactctaaccgctaaagatggagggaacccctccctgtccacggatgctcacattttgctccaggtggcagacatcaacgacaacgcacccgccttctcccgcacatcctactccacctacattcccgaaaacaaccccagaggagcctctgtcttctcagtgacggcccatgaccccgacagcaacgacaatgctcatgtaacttactctttcgcggaggacactgttcagggggcacccttatcctcttacatctctatcaactccgacactggagtactctatgcactgcgctcctttgattatgagcagttgcgagacttgcaagtgtgggtgatagcgcgggacagcgggaaccctccactcagtagcaatgtatcattaagcctgttcgtgctggaccagaacgacaacgcgcccgagatcctgtaccctgccttccccacagacggttccactggcgtggagctggcgccccgctccgcagagcccggctacctggtgaccaaggtggtggcggtggacagagactcgggccagaacgcctggctgtcttaccacctgctcaaggccagcgagccgggactcttctcggtgggtctgcacacgggcgaggtgcgcacggcgcgagccctgctggacagagacgcgctcaagcagagcctcgtggtggccatccaggaccacggccagccccctctctccgccactgtcacgctcaccgtggccgtggccgacaggatccccgacatcctggccgacctgggcagcctcgagccctccgccatacccaacgattcggacctcactctgtacctggtggtggcggtggccgcggtctcctgcgtcttcctggccttcgtcatcgtgttgctggcgcacaggctgcggcgctggcacaagtcacgcctgctgcaggcttcaggaggcagcttgacaggcatgcagagctcgcactttgtgggcgtggacggggttcgggctttcctgcagacctattcccacgaggtctccctcactgcggactcgcggaagagccacctgattttcccccagcccaactatgcggacacgctcatcagccaggagagctgtgagaaaaaggattttttatcagcgcctcaatctctactcgaagaagaaagagaagaaacgttttctcaggtaatctatcttttcacaacatacgtactagctagtttgctgaagtaattcacttacttgtttactatatctattttgttccccatatttccttgagggtagagtcaagttttaggaagtgagtcttggtgaattatttcttggtaggtcttagtgttcacaggctgtaagaggaagaagagacgtgagaatctttgtgcaatgaatgtaaaccaggagttaatagataagattatccaaagagcactgcattaggaactagggtgtctggtttcttatactttcttctccatccctgggcaaatcatctcatccacccagatcaacaattttttctttgttaaaaatataaagattggagtttatgtttactcaagtcctttcttcttttaagttatgactcttactctatatttgaatctgtatatgaacagtgaaacatgttagttggctagttctttctcattcagtcttaatacatttctttcagtttggcagcaaaattgttttccttaacttgcatgcccttccctgttaaaaatatggaaatttagaaatatacattccttacagtgtttcaggaaggtatgtcatattattttggcttagttttaaaaatcacattaacctctaagctatatgcttcttgaagaagtgactgacttatcatctgctctataataaagctgtagagtggtaataaacaggtttctcctttttttttatctttctcatacgtgggaaccatactgtattttaatctttaaaataatatatatcctcaatatagttttgcttaaagaaaagatacaaaagattcatatcatacaattgcccagaaccaacttctttatacatctctcttctcaaggtttctactcacaatagctgctagaaatgttcccaatccctcacccaatcccagtgcccctctgatcaattttcttttcccattcctcttcctatattggcttttagtatgttggttatgtatttaataacagagaataataagcacactaatgttctatgtaactggcatcattttttatttttatttgaaaattatcatgtaccaattgagccttttattgaatgataccatatttctcaaagtgctgtgattctttccgttgcatttgatcaagaaaaaattttctgagacaaggtgttgttttggttactattacataattgtctatgagtaaaattggaactcactgtggaataatatgtcataatagctttacttgtaagtgaataataaagtataaacaggaaaattaaagcaaagttatttttagtgtgtgtagtaactccacaagaataaatgtcttatgcatagatatgtaatgcatcatgattgaaacgacaaatatattgtatttatatttctgtgcttggaaacttatggggaaagagattctggaacataaaagcttatttctactagtttcagttggttttgaaaaaacatccttacagtctagatttaaacaaaggaaacttctttcagtaccctgaaggtctgtgatttctctctcacacctaggcattgtcatgctgttctctcccacatccaggccttttcactgatccactcctctcatgtttcctgggaaagcgtttgctaacattaaaggcccaattgaaggcccccctaacccccttggcttctcccattatggtaattatctcagtacactgcaattccctgtttgcttttatatccttataatctctgtgaaggaagctactgtgtctatattgttcaccttaaatccccaaacatattgtctgatgcctaattatgtgtttgtttaatgaatattaaataacaacaaatatcgaaactaagttatcaggtcaccaagaacaaacttaaagaaatataatgtataaatatggctgatttctgtgtgtttcttttctttttttccttgtctcagctcttagagagttaagagtatagagagggaaaggtcaaagaggaggtggatatcttatcaaataaccctgataaatgtagtaagtataagaataaacacattatcaaggttcagtggtggaagaacaagtggtggtcatgtcttttaatagttgtgttggtccttacggccagttctttgttactgtgtgtttcttaaactgaacaattcaaaaaagttaactccactatgtttgaagcaatattggtggcattaaggttagtgcatggattcccaagaaagataacttgaggtgacactgtttaacatatatcgattcaattatgttcaatcaacactagtcctcttatctctgacaagaaggatttcagatcttggataattcaaaaataataatgtgtctgagaggatgcagtaaacggttaggcctcttagtgtcgctgttgaccactcaagaaggagaacgcagctggagaactagtccaccatttccttgctcctaaaatgcaaagaaccagcaaatcagactcagaagatccggggcggctgccaacctcacctcttagtcaaccagctgtttgacctgtgaattaggcccgtaaaagacttcgtttcttgagaaaataagattggagtccgtcgtaggaaactggaaccgaattcagagaaagcgattcaccgaaaaggaaatgaccaattgcctgagtttccgaaatggcagaggactggccctgctgtgcgcgctcctggggacgctgtgcgaaacaggatccggtcagatccgctactcggtgtctgaggagctagataaaggttccttcgtgggcaacatcgctaacgacctggggctagagccccgggagctggcggagcgcggagtccgcatcgtctccagaggtaggacgcagcttttctctctgaatccgcaaagcggcagcttggtcaccgcggagaggatagaccgggaggagctctgcgctcagatcccgctgtgtctggtaaaaattaacattctggttgaggataaattgaaaatttttgaagtagaaatagaaattaaagatattaatgataatgctcctaatttcccaacagaggaattggaaataaaaattggtgaactaacggttcctggaacccgatttccaattaaaactgcttttgacccagatgtaggcattaactccctgcagaactacaagcttagccccaatgactacttctctctggctgtgaatagcgtctctgagggggccaagtatccagagctggtgctggagcgggccctggaccgtgagaaaaaagaaattcaccagcttgtcctggttgcctctgatggtggcgaccctgtccactctggcaacttgcacatccaagtgatagtcctggatgcaaatgacaacccaccaatgtttactcagcctgagtaccgtgtgagtgtttgggagaacgtgcctgtgggtacccggctgctcacggtgaatgccactgaccctgacgagggattcaatgctcaagtgtcttatattctagataaaatgcctgggaaaatcgctgagattttccatcttaactcagtgagtggagaagtatcaatattaaaaagtctagattatgaggatgccatgttctatgaaattaaaattgaagcacaggatggaccaggtcttctttcaagagccaagattctagtcacggttctggatgtgaatgacaatgctccagaaattacaatcacgtctctcacaagctcagtcccagaagagggcaccgttggaagagaaattgctcttatcgacgtgcatgaccgagattctgggcagaatgggcaggttgaagtttttgtcctgggaaatctgccatttaagttagaaaaatcaatagatcaatattaccgcttagtgacggccacatccctggaccgcgaacaaatatcagaatataacattagtctgagagcctcagatgggggaagcccgccactgtccacagaaactcacatcaccctgcatgtgattgacatcaatgacaacccacccaccttccctcatttatcctactccgcctacattccagaaaacaaccccagaggagcctccatcttctcagtgacagcccaggacccagatagcaacaacaacgcccgcatcacttatgcattgaccgaggacactctccagggggcgcccctgtcctccttcgtctctatcaactccaacactggcgtcctatacgcgctgagatccttcgactacgagcaatttagagacttaaagctactggtgacagccagcgacagcgggaaccctccactcagcagcaacgtgtcgctgaacctgttcgtgctggaccagaacgacaacgcgcccgagatcctgtaccccgccctccccacagacggttccactggcgtggagctggcgcctcgctccgcagagcccggctacctggtgaccaaggtggtggcggtggacagagactcgggccagaacgcctggctgtcctaccgcctgctcaaggccagcgagccgggactcttctcggtgggtctgcacacgggcgaggtgcgcacggcgcgagccctgctggacagagacgcgctcaagcagagcctcgtggtggccgtccaggaccacggccagccccctctctccgccactgtcacgctcaccgtggccgtggccgacaggatccccgacatcctggccgacctgggcagcctcgagccctccgccaaacccaacgattcggacctcactctgtacctggtggtggcggtggccgcggtctcctgcgtcttcctggccttcgtcatcgtgctgctggcgctcaggctgcggcgctggcacaagtcacgcctgctgcaggcttcgggaggcggcttggcgagtacgcccggctcgcactttgtgggcgcggacggggttcgggctttcctgcagacctattcccacgaggtctccctcactgcggactcgcggaagagccacctgattttcccccagcccaactatgcggacacgctcatcagccaggagagctgtgagaaaagcgagcctcttctgataactcaggatttacttgaaatgaaaggagattccaacctacttcaggtgagtttatttatttctttgattattaagaacaaatatgagaatgtggttattataaagctttaacacatatgtatttgagaaataaagccatgaggttgtcattagtcctttgactaaatatttgtccccctttctttctgggcctatagtaggactgcactccccggtctggttatggttgagtgggcttagggaaaaaataatacatcgtgagtgaaagtaaagtgtcacttcctagaggaatctgccactgtgagaattttcagatctctaagttactatttgaaattgtgactgctccttctacctgggtccttgagtaactatgatgagagaaacacaacactggtttgtatacctgtgataaataggcctttttcattttaaatccctgtgctttggagtttgtcattccaacctgtatagcttatcctgatacatacaagtaaaaatacatatgaataaaagatattttatgcccatgaaattaaatgatgtttgactccttccaagacaggtgacactctttttttctttctccttccttccttcctctctctttcctccttccttccttcctctctctctttcctccttccttccttccttcctctctctctttcctccttccttccttcctctctctctttcctccttccttccttcctctgtttctctctttctttctttctttctttctttctttctttctttctttcttgacagggtcttactctgtctggagtgcagtggcatgatcacggctcactgcagccttgacctcgcagactcaagtgatcctcccacctcagcctcccgagtagctgggactacaggcacgagccaccctcccagctaatttgtttttgtttttgtagagatggggcaattgctatgtttcccaggctggtctgaaattcctgagctcaagtgatctgcccacgtcagcctcccaaagtactgcgattagaggcatgagccaccatgcctggcctgttattcttttcatctcaataacataaaaattggagaacaaaaatgtagaggctgggtgcagtggctcatgctgtaatcccagcactttgggaggctgaggcaggtggatcacttgaagtcaggagttcaagaacaccctggccaacatggtgaaagcctgtctctactaaaaatacaaaaattagctgggcatggtggtgggcgcctgtaatccaagctacttgggaagctgaggcagaagaattgcttaaacccaggaggcagaagttgcagagagccaaaattgggccactgcactccagctggggcaatagagagagactccatctcaaaaaaaaaaaaaaagtagaggctggtcaaatggttttacctatagtgcctgttacatatgcctaatgtatatgcttatgtgtgtattcattttgatttcaacattttgcctgagggtggaaagctcacctagctaaattattatgagccttggagtggtatttcttgtccttgagaaggacatcaaaaacatgtaaaggaatatgtctcagcctctgcgggagatttccagacaatctcttccaacaatggaatagaagtcccttcttttgtcatgttctacaactttcttgagccagaaattgttggcttattctgcaatttatgaaattattttcactcatgaaatcatatgagagttatccaaaattagaccaaaatatgttttattagaactcaaacaaaagaatagattcctccctcaatatattaggaaaaggcacatttaaatgtatgagacaacagggccagaacacaaaagctgtaagcagagtaaggtgtattctcactgaaacatggaaatacatcacagaatttaaaaggcccatagccaggggaggacttctgagcctaggactttgagacctacttgggcaacatagcatgaccctgtctcaaaagaaaaaggcacgtaacttttaacatatcatttttagaaaaaaaaatgtttatagtattagtatcactttccctgtaaggagaaaaaaaattaattagctgtgtcaggggaaatttggatgctcaaagataatttctaagaattctatatgaaacatagcctacatatgtgtcatgaaaatacactgagagtatggaacccatacaattccacctacttgtacaggtaatggaaggtctcagacatcccattttcactaaaaaggatttatttttatttttttgaagaatgggcaagaatccactacaacagaaagggaggagaagttcatagtaaaaggaatggaaagtataaaggcatgatgcaaggaaacaagtgaaaaggtatcttaagaaaacagataataggctgtttcgaatagagtatgagtatgggtgagcactgcaaaatagtagaataaattgttgagttggatctcatttggtaatgcatttgaaataaagggatttgctttgaaccaagactggttctaagcctggaactacagaataagttccaaaattgggtgtctaagaactctgaatacctctccaatatttaccagtggtcaagtcaaactcgttttgctcattaatggtataagtcggctggagctgagaattggcattatagagaatgtttttgagacagagtcttgctctgtcacccaggatggacttcagtggcatgatctcaactcactgcaacctctgcctcctgagttaagtgattctgctgcctcaacctcccgagtagctggcgttacaggtacccgccaccatgcctggataatttttattttttttagtagagatggcttgcaccatgttggacaggctagtctcaaactcctgacctcatgtgttcttcccaccttggcctcccaaagtgctgggatcacaggtcactgcacccagcctagagtatttaatatacattcatataaaaaagaagcactggtttcataaaacaaatgtacattatatgagattccacttcataaaagcatgtatgtgtaccccaacactaaattggcccttttaacaaaatatcagactttgtcctacttaactggaaagattatctatattttataaagaagagaaataacataatagtaaggctgtgatttcctcttttttgcaaaaactatttttgaaaagtattactgaattgataacatatatatggagagatttaaaatactagataagggagcttattccaatgaatttacagaaaggtaggtattttagtcaactaaaaatataaataaaaattatcaattcacttatttggatacagcagtcatgccagagtttataaatatagtgaaatcactgaagatttttttttacccccaaaactgaaaaaaatggcagtgtaccttgtgaattttttaaatgaaaaaagaatacgaaatgatgaaggcccttatctgatgatgacaaactagaaaactgaaatgtaaaggggaaaatgtgagtatgtgtttccctccagcaaattaaagacagggtacatagattcaagaggttgcgctttgaggataaaaagctgggccctgtgcagttttccaagacaacctctgggcgccgctgtcgaccaaaaggaagtgaaggcttctcaattctgcaggagcgtcaggcagggtgccttcctgctttgtccggtgcactgagcacagacgctgctcctgttcaccctcgagcgcctaactaataagtcctaagctcaaatcacagaagtccagggtgctgccatttctttttgaaaaacatcccagaggaaagaagctccgcggagagttcctgaaatgcagagagccagagaagccgaaatgatgaaaagtcaggtactgtttcccttcctgctgtctttgttctgcggggccatctcccagcagatccgatacacgattccagaggagctagccaacggctcacgggtggggaaacttgccaaggatctggggctcagtgtccgggagttgccaactcgaaaactgcgggttagtgcagaggattatttcaacgttagtttggagagcggggatttgttagtgaacggtaggatagatcgagagaagatttgcggaaggaaacttgagtgtgcactagaattcgaaacggtcgctgaaaacccaatgaatgttttccacgtggttgttgtaatccaagatattaatgacaatgcaccacgtttcgttgcaaaaggcattgacttagaaatttgtgagtcagccttacccggggtaaaattctctctggattctgctcaagatgcagatgtggaaggcaattcactgaagttatacaccatcaaccccaatcaatacttctctctgtcaacgaaggaaagtcctgatggaagtaaatatccggtattactgctggaaaaacctctagacagggaacatcagagctctcatcgcttaatcctgactgccatggatggcggggacccgcctctaagcggcaccacccatatctggatccgagttacggatgccaatgataatgctcccgtgtttagccaggaggtatacagggttagcctccaagaaaacgtaccgtggggaacctccgtgctgcgggtgatggccacagaccaggatgagggcattaatgcagagatcacctatgccttcctcaattccccaataagtaccagcctcttcaatctcaatccaaatactggcgacatcacaaccaatggcacattggattttgaagagacaagtagatatgtgttgagtgtggaagctaaggatggaggagtacacacagctcactgtaatgttcaaatagaaattgttgacgagaatgacaatgccccagaggtgacattcatgtccttctctaaccagattccagaggattcagaccttggaactgtaatagccctcataaaagtgcgagacaaggattctgggcaaaatggcatggtgacatgctatactcaggaagaagttcctttcaaattagaatccacctcgaagaattattacaagctggtgattgctggagccctaaaccgggagcagacagcagactacaacgtcacaatcatagccaccgacaagggcaaaccagccctttcctccaggacaagcatcaccctgcacatctccgacatcaacgacaatgcacctgttttccatcaggcctcctatgtggtccacgtgtctgagaacaacccacctggcgcctccattgcacaagtaagcgcctccgacccggatttgggacccaacggcagagtctcctactctattctggccagtgacctggagccgcgggagctgttgtcctacgtgtccgtgagcccgcagagcggggtggtgttcgcgcagcgcgccttcgaccacgagcagctgcgcgccttcgagctcacactgcaggccagggaccagggctcccccgcgctcagcgccaacgtgagcctgcgcgtgttggtgggcgacctcaatgacaatgcgccacgggtgctgtaccccgcgctggggcctgatggctccgccctcttcgatatggtgccacgcgccgcagagcccggctacctggtgaccaaggtggtggcggtggacgcagactcaggacacaacgcttggctgtcctaccacgtgctgcaggccagcgagcccgggctcttcagcctggggttgcgcacgggtgaggtgcgcacagcgcgtgccttgggcgacagggacgcggcccgccagcgcctgctggtcgctgtgcgtgatggaggacagccgccactctccgccaccgccacgctgcacctaatcttcgcggatagcctgcaagaggtattgccagacctcagcgaccgccctgagccctctgacccccagacggaactgcagttttacctggttgtggccttggccttgatctcagtgctctttctcctcgcggtgattctagcgatcgccctgcgcctgcgacgttcctccagcctcgacactgagggctgctttcaaaccggtctctgctccaagtctgggcccggggttcctcccaaccacagcgaggggactttgccctattcctacaatctatgtattgcctctcattctgcaaagacagagtttaattctctcaacctgacaccggaaatggctccccctcaggatctgctgtgtgatgatccttctatggttgtatgtgccagtaatgaagatcacaaaatcgcttatgacccttctttgtcttcgcacgtgagtttctgcaaatctagttaaattttatatatggcggccgggcgcggtggctcaagcctgtaatcccagcacttaaccaggctgaggcaggtggatcacttgaggtcaggagtttgagaccagcatagccaagatggtaaaacccggtctactaaaattacaaaaattagttgggtgtggtggcacgcgcctgtagtcccagttactcaggaagctgagacaggaggatcgcttgagcccgggaggtggagattgtagtgagccaagagtgtgccactgcactccagcctgggtgatgggagggaaactgtctaaaaaaacaaacaaacaaaaattatatattgcattttcttctcattggtgtataagtaattttgattttctttcattgttctagtgatggtatctactgcgggagggggtactagatagatggagattgctttcttgattgctcagtagtcttggcaatttaattttcaatctttactgttggcatttctgtatggttggcaaatcttgctaaagagacctgtttcctagatgttaacacttagtaatagcagtgccttttcttagttgatatgcaatactatattttcaagtcattttattcttagctctttataaatgtatttagagttcttcccacccaagttaaagttcatcaattacattaattatgtaattgatgtaattatgtattaatgtaattatgtaattaatgtaatcttcatcaattacattctagtttgtctttttgcagcaacatgtatgtttaatacagccttccaattattaagactcttaacactttgtctcatcacaagtagcaaatattgtccaattttatatttgcatcactaactttgagtcaatattattcccactctataatttcagtcaatgatatttcataattttcttaaccattcctaaattatttgtttttatgctctttctattttgtctctattaaaacaaagaatgtaatgaacatttgggtttataaagcgttttccatacttcttgtttctttagtgtagatttctgaggaattagttaaatctataaacatgttgagatttttttaatgcatactgtcaaatttatttccaaacatcttatttcacctctcaatcatccgcagtttgtgcggtctttgaggattgtgaaaaacacgtttaatctactctctcaaagtctgagggtttttaaattctgtatagctaatgcccttttgtatgagtcatttctactgctaattgttaagtgaggaataagcttaagaactgatgtactgctttatctcaaattttcacagattagtaaattactgtaagtattcataagaaagaaagcgatggcacatgcaatgataatccatgttcggctaccaaaacatttccttttactggctatttctaaaatgagagctaaagtaaagttagaaattgtaaaataatactgaatgtgtcatgtgaaaaaatcactaaactattatctgcactttatagttattcagtctaacttttctttttatttcttttttatttttaagatcagagttatttacccattgttttaggctttgcatttgaactggtcattcatgaaacattgaaaggtttcataaaaattactactctatgaaaggtattgttctaaagattgagaacacattgtgaacaagatagtcatatgcatagcttgtggccaagaatctactgtacacaaaattaaggagcaaattctcttcccaaacctattatcctatttgtcaatctcatttgtacagggtaaggctaactcttgaacagtaggtgagttttttgcaagggaattgaagcattgccccaggttctagagggtcaactcctgtgaggaaacttgttactgcataaattgggactaaagccagacctccaagttcctgtcccactgtcttttcacttatctgtctcatccatttttcaagtccacctttgtctttaggagagataattatgtccctcacacaatacgctatactgagaatgggctgtggggatgaacaatgtgaaaactgaaaagaggaagaacacatcttaggaaaaaaatcgtcatattttctctaagaaaataaataacttcataaagtttattgtacaggaagacttggatcattcttgaattttcattgcaaatcaaaaacaggaatttgactttattatcttgggagaaataggaatagaaaagtgtataaaaaataaactttttttaaccaagaataaattgcagtaacaggttaagactctgggtgtcgctgttcaccaatcagggggaaaagacaaaccagaaatttaatcagaatcacaagatttctgcagcacaaagcactggctctggagctttatgaaagcttcaagcggaagccctgagagctctggctgtgaatgcactttattttggacccagaagatcctggggctcctcaggcctcgacagagggaaaaccgaagcacaggcgactccgcggcggggttgtaatggcggcgcctcctgctcgcccagaccacacccggctgctccagatctgccttctcctgggggttctggtggaaatcagggccgaacagattctctactcggtgtttgaggagcaggaagaaggctcagtggtgggcaacatcgccaaggacctggggttggcgccccgggagctggcggagcgcggagtccgcatcgtctccagaggtaggacgcagcttttcgccctgaacccgcgcagcggcaccttggtcaccgcgggtaggatagacagggaggagctctgcgacagatctccaaactgtgtgacaaacctggagattcttctagaagatacagtgaagattttgcgggtagaggtggaaataatcgatgttaatgataacccacccagttttgggacagaacagagggaaataaaagttgctgaaaatgaaaatcctggggcaagatttcctcttcctgaagcttttgatccggatgtaggtgtaaactccctgcagggttaccagctcaactcaaacggttacttttccctggacgtgcaaagtggggccgatgggattaagtacccagagctggtgctggaacgcgctctagatcgcgaggaagaggcggttcaccacctcgttctcacggccttcgatggaggtgacccggttcgctctggcactgccaggattctcataatacttgtggataccaacgataatgctcccgtgttcactcagcccgagtaccacgtaagtgttcgtgagaacgttcctgtaggcactcggctactcaccgtaaaagccactgatccagatgaaggagccaatggagacgtgacgtattctttccggaaagtaagagacaaaatatcacagctatttcagttgaattctctgagtggggatataacaatattggggggtctagattatgaggactctggattctatgacatagatgtagaagcccatgatgggcctggtctccgagctagaagcaaggtactggtgacagttctggatgaaaatgacaacgcaccagaagtcacagttacatctctcaccagctcagtccaggaatcttcttccccgggtacagtaattgcacttttcaacgtgcatgacagtgactcaggaggaaatggcctagtcacatgttctattccagataatctgccattcacacttgaaaagacctatggaaattattatcggttgttgacacacagaacactggacagggaagaagtctcagaatataacatcactgtaactgccactgaccagggaactcctccactgtctacagaaactcatatttcactgcaagtgatggacatcaatgacaacccacccactttccctcatgcttcctactctgcttacattcctgaaaacaaccccagaggagcctccatcttatctatgactgctcaagaccctgacagtggtgacaatgcccgaatcacttactccctggccgaagacaccttccagggtgcacctctgtcctcctatgtctccatcaactccaatacagggatcctatatgctctttgctccttcgactatgagcagtttagagacctgcagctgctgatgacagccagtgacagtggagaccctccactcagcagcaatgtgtcactgagcctctttgtgctggaccagaacgacaatgtccctgagatcctgtaccccaccttccctactgatggctccactggtgtggagctggcaccccgctccgcagattccggctacctggtgaccaaagtggtggcagtggacagagactcaggtcagaatgcctggctgtcctacagcctactcaagtccagcgagccgggactatttgcagtggggctgcacacaggcgaggtgcgcaccgcacgggccctgctggacagagacgcgctcaagcagaggcttgtagtggtcgtccaggaccatggccagccccctctctcggccaccgtcacactcactgtggctgtggccgacagcatcccagatgtcctggctgacttgggcagcctcaagccttcagcagacccagacgactcgggcctcacactctatctcgtggtggcagtggccgctgtctcctgcgtcttcctggcttttgtcacggtgctgctagcactcaagctgagacgctggcacaagtcacgcctgcttcacgctgaaggcagcaggttggcaggtgtgcctgcctcgcactttgtgggcgtggacggggttcgggctttcctgcagacctattcccacgaggtctccctcaccgcggactcgcggaagagtcacctgatcttctcccaacccagctatgcagacacgctcatcagccgggagagttgtgagaaaagcgagcctcttctgataactcaggatttacttgaaacaaaaggagaccctaatcttcaggtgagtcaatcttataatagatcataccacactgaaatatagacaaagagttgtgtaaatgtctctcattttatatgtaatatatcaaataaagttgcctcttttaatattttattgctttaaagaaaactggtggatgaccttccaataatgatcaacagtatttaccacacaaaaatgttgtttattacttatcctttttggtcttcattcagttgtagtttcagccagaattttctaattttacaactctgagccacctcatttccttaaatttccttttctgtgctgggtgtggtggctcacacctgtaatcctaacactttgggagtgtgaggaggacggattgcctgagctcaggagttcgagaccagtctgggcaacatggtgaaacccagtctctactaaaatacaaaaagttagctaggcgtggtggtgtgtgcccgtagtcccagctaccctggaggctgaggcatgagaattgcttgaacctgggaggcagaggttgcaatgagctgagatcatgacactgtactccagcctgggcaacagagcaagcctctgtctccaaaaagtaaaataaaataaagtaaaataaagaataaatttccttttctcttaggtgttcctgaaaagatacaagagacctgtaaaatagaaggcaattgtgtaaattcacatttacaatattctttctcatgaagctattgttggatctggactgagggttttttaatttcctattttcacactctaccatgctttgcttgaagtttacttttccttccttgaaagggtattttccattataacaggcaacgtcaatttaagaatactggcaatttgtgagtttaacttttagatataactttaacaggatattttctcaatgaactggtatatttcaaatattttcttgttgctgttctgagatgcaccagaagtgactatgtgtgattcctctggtgcactcctgtgattatgagaaatatttccaagctaatttcagtcatatataagtagattctaggagtaactttaataatttttaaattgcttatcatgacatcactattgagactttcttgatttccaaggaaaatataagtttttggagtcttttctcttgtcatcatgtgagcctctttcaaaggttgagttacttgggttctggactgatatgatttacgctgcttagtaaggtggcctcatccctattgctacaaattgctttcagatatttctgtcatcatgtggctctgggattattttatatgagggaaaatattttgtgtgtaggggatatacaacacttttgttctttgtgctttcatttaggttctgtgagaattcaaaattcatgaatgcatatgcttacacaaattagtgtaatttgataactggaagttgtagtgatagactgtggaatatgcctcaatttgacttacaaaggagagttttagtttctacatggttttgtattcatagaaagttgtggtgcaatacatagagtaagctggaatatgatatgatgcagttacctggcttggggagcagaaagcagaaataacaagtgaatgttgagagacaacttacatctgaggagagattgtttaaagtaattaagccataaaatataatttggaaatgctcaattggtctgaaactgtgtcaagcatattcaggtgttggcattaggaatatattccagaatgagagtgccacatgttttaaaggcctaggaaagcagtagataatttataacctaaaatcaaattttttaaaaaatgtgtttttgttagaatgggcagtgggtttcttttagcaaataacaattttgattaaacaaattgttgtatattcatattacggactactagataactatattatgggccactagataactataagaaataaataggaaagctctctatgtactgatatgatctttaagatataacaactaaaaaagcaatgtgcagaatatggtatgttgtatgcttacatttgtgtaaagaaggagacagaatatttataaaaatccgttgccctatacaagacatatctccggaaggatacctaagaaactttaacactcatttcccctgtgaaagcatttctcctcatctaaagcagagatgaaaggaagaacctatgctgaatgcatcttttgaatttggaactatatgaatatttcacatattttaaaacaaatgaagactttataaattaaaaaagaaaagaaaagaaaaaagttcttagcaaatattgacaagccattagtgcagtttcctgagaaaacctctgagcgtcgctgttggtcaaaagaacgaagagaagcgtttgggagcctcttagaggggaacttcctgcacaaaccaaccacacagagaaggccagtatagattcggaaacagaaaacaaaagcaggaaaagtgaccttagcccggattctgccatccccggaaggcttattcctcctatgggcaaaggagcaaagggagccagaagatgaaagcgagctcagggaggtgcgggctggtgcggtggctgcaggtactgttgcccttcctgttgtctttgttccccggggctctcccagtccagatccgctattcaattccagaggagctggccaaaaactcggtcgtaggaaacctcgccaaggatctggggctcagcgtccgggacttgccagcccggaagctgcgggttagcgcggagaaggaatatttcacagtaaacccagaaagcggagacttacttgtgagtgacagaatagaccgagaacagatatgcgggaagcagcctctgtgtgttctggatttcgatactgtcgctgaaaatccactaaatattttctacatagcagtaattgtgcaggatataaatgataataccccgctattcaaacagactaagattaatttaaaaattggcgaatccactaagccaggtacaacatttccacttgacccagccctggattcagatgttggtcctaactcactacaaagataccaccttaatgacaacgagtactttgatctcgctgagaaacagactccagatggtcgtaaatatcctgagttgattctaaaacactctctggacagagaagagcacagtttacatcaattggtcctcacagctgtggatggcggagacccacctcaaagtggcacgacccaaatccgaatcaaagtcacggatgccaacgataaccctccagtgttcagccaggacgtgtacagggtcaccctgagggaggacgtgccgccgggcttctttgtgcttcaagtgacagccaccgaccgggatgaaggcataaacgcagagatcacctactcctttcataatgtggacgaacaagtgaaacactttttcaacttaaatgaaaaaacaggagaaatcacgacaaaggatgatttggattttgagattgcaagtagttacactctgagtatcgaagcaaaagatcctggagatctagcagcccactgcagtatccaagttgaaattcttgatgacaacgattgtgcacctgaagttattgtgacttcagtatctactcccctaccggaggattcgccaccaggaacagtgatcgccttgataaaaacgagagacagagactctggagaaaatggagaagtttactgccaagtgttgggaaatgccaagtttattttgaaatcttcctcaaagaactattacaaactagtgacagacggcgctctggaccgggaggagatcccagaatacaatctcaccatcacagccaccgacgggggcaagccgcccctctcctccagcataattgtcaccctgcacatctccgacgtcaacgataatgccccagttttccaacagacttcctacatggttcacgtggcagagaacaatcctcctggcgcctctatcgctcaaatcagtgcctctgaccctgacttgggccccagtggccaagtttcctactccatcgtagcgagcgacctgaagccgcgggagattttatcctacgtgtccgtgagcgcgcagagcggggtggtgttcgcgcagcgcgccttcgatcatgagcagctgcgcgccttcgagctcacactgcaggcccgcgaccagggctcgcccgcgctcagcgccaacgtgagcctgcgcgtgttagtgggcgacctcaatgacaatgcgccacgggtgctgtaccccgcgctggggcctgatggctccgccctcttcgatatggtgccacgcgccgcagagcccggctacctggtgaccaaggtggtggcggtggacgcagactcaggacacaacgcttggctgtcctaccacgtgctgcaggccagcgagcccgggctcttcagcctggggttgcgcacgggtgaggtgcgcacagcgcgtgccttgggcgacagggacgcggcccgccagcgcctgctggtcgctgtgcgtgatggaggacagccgccactctccgctacggccacgctgcacctaatcttcgcggatagcctgcaagaggtattgccagacctcagcgaccgccgggagccctctgacccccaggcaaaactgcagttttacctggttgtggccttggccttgatctcagtgctcttcttcctcgcggtgattctggcaatctccctgcgcctgcgactctcttccaggtcagatgcttgggactgttttcagcctggtctcagctccaagcctggacctggggttctccccaattacagtgagggtacattgccctattcctacaacctgtgtgttgcctcacaatcagccaagacagagttcaattttctgaacataaccccggaattggttcccgcgcaagatctcgtctgtgacaatgcctcttgggaacaaaatacaaatcatggagccgctggggtcccttttgcctcagatactattttgaaggtgagctttaattaatttattttcacttctggttttattgtttcacctaatttgggtaggaagttccactgcgtatttctttgtctgtgagttagatttggccaatgttgtgccttaattgtcttaatcttatctaactgaattttaagtgttttctctctgaagtgtgagatttatttacccatgattgcaaacctttatcacatgagatattgcactgtatttctttttcttcctcatctttacattacttctctctgcagatttgttgctattgagactttaggcaattagtttcaccttcaggctctttgttattcaaattttagttttacttcctcttagaatcataatacttcagagtaaagagagtcttcattttagtaggctttggaaattgggaaacaaagaagaaagacttttgcataatggcatggcttgttaatcacagggcatgggtaggacattgtcccattgacttgaagaccaacactcagtaagctaaatgtcttggaatcacaaatgtatttctaaaggacaggcaatgtttgaggtctgaggtgtctgctagaaagagtgcatttaacaaatgtgagaaatcattctctaacatgcattttaacaaattgctcttaagaaaaactacacattgagaaaaatcttacaacctatgttcacatcattttctacaaaatattacttaaaactttgcttttgaatttcctaattatatagaatttttattttcttagttttctatgaaagtgttattaaataaaatgactttctgaaatgtccatttttttcaatcaagaggtttttctatttctgttgtcatataaagatgatagcagtaaatatctgtctcaacatagaaaggtcactcagtacttctcgacaagtatctgctcatgctttcctgcatggatgatgaaataaaaccccatcctccacagttactatactggttgtcactggaactacaaatatttgaacatggtaatagaaaaacataaaaatgcatagttaacccaactcaaacgctgtctgagatagtggagagactttctcaaagtcctcacaagtaacaaagatctttatttcttctgcatatgacagctaatataacttacataaatcagtaggcctgtttggaaaggtgcatggagaactgggtttgtttccttggtattcttatatgcaaataagcacgttttcctaaatttatcctaataaggagatgaaatcttgaatcctacaaaggtaagaatttgaatgtcctaatttaatggactaaatatagataagaggtaaataaaggacataggctcccccgatgacgcattaaataaaatttttgtaaggtattgagatctaataatcatattgatctcagggattgtggaagtcttgctattcagaattaaagctgaattaacggtcataaacaacgctacacagttaaacattaaggatatggcaacattattagaaataaaattataactaaacttaggagaaataaaaatggaatttgatgcagtcactggttaggactctgagtgtcgctgttgaccaaagtgggaaagaagctgccgcagaggcgacccgactctgctccctccatactaaacacacagaccagacaagctcctacgaaaagccaacgctccacgcccattttcgtcagggaatatgtacccatcggctttagataaataaggaaacagcaggctgaaccagaactaagagaaaattgggcagagagaaggcaatggcgagtccacctaggggctggggctgcggagagctgctgctgcccttcatgctcctggggacgctgtgcgagccaggatccgggcagatccgctactcgatgccggaggagctggacaaaggctccttcgtcggcaacatagccaaggaccttgggctggagccccaggagctggcggagcgcggagtccgcatcgtctccagaggtaggacgcagctttttgccctgaacccgcgaagcggcagcttggtcaccgcgggcaggatagaccgggaggagctctgcgctcagagcccactgtgtgtggtgaactttaacatcttggttgagaacaaaatgaaaatttatggagtagaagtagaaataatcgatattaatgataacttcccgcgtttccgggatgaagagttaaaagtaaaagttaatgaaaatgcggctgcagggacacggttagtgcttcccttcgcgcgggatgcggatgtgggtgtgaactctctccggagttaccagctcagctccaatctgcacttctctctggatgtggtaagcggaactgatggacaaaagtatccggagctggtgttggaacagcccctagaccgcgagaaagagactgttcacgacctcctcctcacagctttagatggcggagacccggtactctccggcaccacgcacatccgtgttacggtcctcgacgcaaacgacaatgcgcccctgttcaccccatccgagtacagcgtgagtgttccagagaacatacctgtgggcactcggctgctcatgctaaccgccacggatccagatgagggaataaacgggaaattgacctactcttttcgcaatgaagaagaaaaaatttcggagactttccaacttgattccaacctgggggaaatctcaactctacaatcactggactatgaagaatccagattctacctcatggaagtggtagctcaggatggaggcgctcttgttgccagcgctaaggtggtggtcacagtacaggacgtgaatgacaatgcccccgaagtgatcctcacctctctgaccagttcgatctctgaagactgtcttcccggaactgtaatcgcgctgtttagcgtacatgatggtgattctggagaaaatggtgagattgcatgctctattcctaggaatttgccttttaaattggagaagtcagttgataattactatcacctattaacaactagggacctggacagagaagagacttcagattataatatcactttaaccgtcatggaccatggaaccccgcccctctctacagaaagccacatccccttgaaagtagcagacgttaatgacaacccacccaatttccctcaagcctcctactccacctctgtcacagaaaacaatcccagaggtgtctctatcttctctgtgacagcccatgaccccgacagcggcgacaacgctcgagtcacctactccctggctgaagacacatttcagggggcgcccttgtcctcctatgtatccattaactctgacaccggtgtcctgtatgctctgagatccttcgactatgagcagttgagagacctacagttgtgggtgacagccagcgacagtgggaaccctccacttagcagcaacgtgtcgctgagcctgtttgtgctggaccagaacgacaatacgcctgagatcctgtaccccgccctccccacagacggttccacgggcgtggagctggcgcctcgctccgcagaacctggctacctggtgaccaaggtggtagcggtggacaaagattcaggccagaacgcctggctgtcctaccgcctgcttaaggccagcgagccaggactctttgcggttgggctgcacacgggcgaggtgcgcacagcgcgagccctgctggacagagacgcgctcaagcagagcctcgtggtggccgtcgaagaccatggccagccccctctgtcagccaccttcacggtcaccgttgccgtggccgacaggatccctgacatcctggctgacctaggcagtatcaagacccccattgaccctgaggatctggacctcacactctatcttgtggtggcagtggctgcagtctcctgcgtcttcctggccttcgtcatcgtgctgctggtgctcagactgaggcgctggcacaagtcacgcctgcttcaggctgaaggcagcaggttggcgggtgtgcccgcctcgcactttgtgggcgtggatggggttcgggctttcctgcagacctattcccacgaggtctccctcaccgcggactcgaggaagagtcacctgatctttccccagcccaactacgcagacacgctccttagtgaagagagctgtgagaaaagcgagcctcttctgatgtctgataaggtagatgcaaacaaagaagaacggcgagttcaggttagttttctctttcggtaaggatgaccagaacattttcatttgtttcctttttcatgtttctgtcatattcagaatcagctagttatgtaaatagtggaacattatttgctgtattggagattaattttttttatataattcatgctttctccatttgttttcaaattctgttttgggaagtctagctgatatctgtagacttaagtgaaacaaataccttaaaggaaagtggttaaatataatcattttacccaaatattttgttatattggaactgcagttctattaatagaaaagatgttttatttattcaaattgttagatatattgttctcttttgagtgtctgcctagacaccattagtgaatgtgttttggaaaggataatgtataggactgatattttagtctacctgaaatttgtttaaggaaataatttacagtatttacataaatcagtggaaaggtacagagaacttctgggtcataaatatcagaaaagaggccgggtgcggtggctgacgcctgtaatcccagcactttgggaggctgaggtgggcggatcacgaggtcaggagatcgagaccatcctggctaacacggtgaaaccctgttctactaaaaatacaaaaaattagccgggcgtggtggcaggcgcctgtagtcccagctactcggaaggctgaggcaggagaatggggtgaacccgggaggaggagcttgcagtaagccgagatcgcgccactgcactccagcctgggagacagaacgagactccgtctcaaaataaataaataaataaataaataaataaataaatatcagaaaagtagataaaatttatattaatgataacatgtagcattctaaagtctggaaagtttgtgttaagccatgtagttattggatatgtgggcttgttgagagaagaaatcagtgtaaaggaaccttaaggttgggcttcgttctgtgatgtaaagcctccagagagttacatactgctgcactcaataaatgtaaatatgtcacacacctggcatcttctgttatagataaaccctttacttattagaatcaatacctactgcaatgttagcgtttctttaagtgtaggtgcaattcttctttattacttgagtttaaggttgtatttgaaaaaaaaagaactcaacttaaagatggttcaaaattttaaatttcatatctaacgtatgtgctcatcttaaattaatagatttgtcttaatgaaatactggcctatgtgcctcaaattccaggaggatgtgttatgtaatgaaagaactactatatttcccttctgcatctgatttgctgaagatgattttcagatgtttcttattaaaatattcttaatccttcaaattttgtacttttaaaaccttgagcatcagcttcaaataatgactaaataaggggaaaaggtaataaaatattacaaatgggatagtaagctacattactcaaccacatgaaaggttaattgacacattaaagaacctaagaccacttgatttttattttttaaacactgttaaagagcattcaagtatatctatatctatatacatatacacacacatatatatacacacatatatatacacacatacacacacacaaacacacatacatacacacatggacattctgaccaaaatgtaaaatgtacaaactcaccgaatagtgaatgcatccaaagagtaacaagagaatctatacagtaggtgtcgacattattcactcctatgtgaaaacttgcttttccattttttttaaaagaaaatgttatatgcttcttagggtaaggtgtttgggaaaaaagtaaaggttatagatttgggtacatttcttctgagttaaatgttttgtgcaatggaaaaatatctttaaaccctctataaactactaacagactataaaatgcttgatccatacattttgaatgtatgtactgtatataccatatacttttaaatatctgaatctttagttttatatgtgttctgaagaataatttttcatactaattgaagtgttcatacaatgaacacttggcattgtgttggaaggcacttgctttggaatgttttggagcaaagtcttgagtcagttatatttttgatgtttgtataaaggtgacaatgagtgtctgtctagaattctggttactgtgagtagtttaagatgctataatgcttttccactataaggtgaattcggtgtggaactcattgcttattgctgcacacttgcctagttttagagtaacaatacattatgtaggctaaagataatttctttaggaagattttctggtttgaaaatggaattaaaactgtaagacacctgtcagaaacatggaaaatggcatgttattgaccagggaaaagtgtaaataacaaaaagttaggattatcagatggtaaactggggaccaaggaaaagtggacaggaagattacttatataattaaataatataattataaggacttacaattcactccccaatcctaataacgcatcattgttaggctacttgagaagaaacagtacatttcaggacaattgtgatgtagtatgaaaaaacatcctttgtaaaagtttttcatttgggccagggtggttcatgactataatcccagcaatttgggacgctgaggtgggaggattgcttaaagccaggtgttctagcccagcctgggcaacatagtgaaaccccacctctatagaaaaaaaaagttttcaatcatacttatttaattaaaagtagacacttggaaacaaaggaaaagagaccctcttgctttttactatacttctattttataaggtcaatcatttcctcattacctttaacttcttttggggggagataataaagataaaagagaagaaagtgaaacatagaataaaactaaaagctatgacattataacttttagaagttagaagtaaaggaaatagaatgcaataagaatacacgtgaagctgatatttcaagcctctttatactacgtcttctgccatcaccaaaaatagcttccatttgtatgattttctatgtattattttatttggccctcatttctactagagtaagcagagaagatattattatgaccattttatgaaaatggaaactaaaaacgtgacgggattgagcaagattatctctgccctttgacaagtaaaaggtacttgatttggatggataaagctcaaattaaaagaaataacagactaaagatatagtaagtatatttaatgttttttaaaagtccttttaaaatgggaagaaagtatcactatcagtacactgccgatttttctcctaactagctccttatttggagctgatttagtcaccattactgcagttctgcagcagaggcgccgggtgccgctcttggctagtgctgtgcaaaatattggctcctcccgctgcagccagctcggaagaaaagtgcactctctatcaggcttcctgcagcggagacacccattagagaacccaagcacaaagacaaagcaaatagttggtcctgctcggagaactcttgggattatttaaagatctcctctcctcggatttagaaaggcaaaggcgcagagagcgggatgggaaatagctccggatggaggggcccagcagggcagaggcgaatgctatttctcttcctgctctctttgttagaccaggttctctccgaaccgatccgctacgctattcccgaggagctggacaggggctcgctggtagggaacctcgccaaggacctggggtttggcgtgggggatttacctactaggaacctgcgggttattgcagagaagaaattctttaccgtgagccccgaaaatgggaacttacttgtgagcgaccgtatagaccgagaggagatttgtggcaagaagtcgacgtgtgttctggaatttgaaatggttgctgaaaagcctttaaacttttttcatgtaactgtgctgatccaggatattaacgacaacccaccgacctttagccaaaatatcactgagctggaaatcagcgaactggctctcactggagccacatttgccctggaatctgcgcaagatcctgatgtaggtgtcaattcgctgcagcagtactacctcagccctgatccgcacttctctttgattcagaaggagaacctggatggcagtaggtacccagagctagtactgaaagcacccctggacagggaagagcagccacatcaccacctggtcctcacagctgtggatgggggcgagccctccagaagctgtaccacccagatcagggtaattgtcgcagatgcaaatgataaccccccagtatttactcaggacatgtacagggtcaatgttgcagagaacctgcccgctggctcctccgtattaaaagtgatggccattgacatggatgagggcatcaatgccgaaatcatctatgccttcatcaatattggcaaggaagtgagacaactgttcaagctggacagtaaaacgggggaactcaccactattggagaactggactttgaagagagagatagctacacaattggggtggaagcaaaggatggtggacatcacactgcatattgtaaagtacagatagatatttcagatgaaaatgacaatgccccggagataaccctggcttctgaatcccaacatatacaagaagatgctgagctggggactgccgttgccctgatcaaaacacatgatctagattctggatttaatggagaaatcctatgccaactaaaaggaaacttcccctttaaaatcgttcaagataccaaaaacacatacaggttggtgacagatggagccctggaccgggagcagatcccagaatacaatgtgacgatcacagctaccgacaaaggcaatccaccgctctcctccagcaagaccatcactctgcacatccttgatgtcaacgacaacgttcccgttttccaccaggcctcctacaccgtgcatgtagctgagaacaatccgcctggagcctccattgcgcatgtcagagcctcggatcccgacttgggacctaatggccttgtctcctactacatcgtggccagtgacctggagccgcgggagctgtcgtcctacgtgtccgtgagcgcgcggagcggggtggtgttcgcgcagcgagccttcgaccacgagcagctgcgtgccttcgagctcactctgcaggcccgcgaccagggctcgcctacgctcagcgccaacgtgagcctgcgcgtgttggtggacgaccgcaacgacaatgcaccgctggtgctgtacccagctctggggcccgaaggctctgcgctcttcgatatggtgccgcgctctgcagagcctggctacctggtgaccaaggtggtggcggtggacgcagactcgggatacaacgcctggctgtcctaccacattgtgcaggccagcgagcccgggctgttcagcctgggcctgcgcacgggtgaggtgcgcacggcgcgtaccttgggcgacagggaggccgcccgccagcgcctgctggtcactgtgcgtgatggaggacagcagcctctttcagccaccgtcatgctgcacctaatcttcgcagatagcttgcaagagatacaacctgaccttagcgaccgccccactccctctgaccctcaggcggagctacagtttcacctagtagtggcgttggccttgatctcagtgctcttcctcctcgcggtgattctggcaatctccctgcgcctgcgatgctcctccagacccgccactgagggctactttcagcctggtgtctgcttcaagactgtacctggagttctccccacctacagcgaaaggactttgccttattcctacaatccgtgtgctgcctcacattcctcaaacaccgagtttaaatttctcaatataaaggctgaaaatgctgcaccacaagatcttctatgtgatgaagcctcttggtttgaaagtaatgacaatccagaaatgccttctaattcaggcaatttgcaaaaggtgagtttcttcaaacctttccttccataaatataattgggtttcaattcattgatttagagataaaaagaatacagattaaatattccctgattacattattttattgattttctggtgtagagtagggtgtctaggaaattctttgtagaatttcctgtagaatatctgtgttgcagttgttctttcatagaaagcctccttttgatagtcttgaaacttttcttaatcctaatacactataatctgaaacatttttaatacagtattatctcacactgtcattttcagacatatctatccagaattagacccaaatcctcacaattaagtggtttacttagttttaatgcagtcaatcctaaaatatatgaaacattatgtatatcttaacacatttttaatgtaacctgtatataatatttttacttccctttgcatgtttttaaaagtatacacagatgttgcctatgtcagggcagtttttaacttctatgctaatcaaaagaaataatggcatctaaaatggcaactcttgtaatgggcactgtaatgaattggttcaaaatgtgtttgtgtagcatatgcctgtagtcccagctactcgggaggctgaggtgggaggatcccttgatcccaggaggtagcagctgcaatgagctataattgtgcccctgcactctagcctgggagacagagcgagactttgtctccaaaaaagtgtttgtggttgttggtacccttactgaaaatgggactagcataaatggtggtgaaatgtgatgataattcaaaatttacagaagattgtaatattatttctgttccccaaggtcctaagagatattttcataaaaatgaatggtaaacttcagagaacatttaaaattattcaaaataatctcttacactcttctaaatgcttcattatcttggggagggaaatattatgagtgtcatctctgcagatttagcagaaataaaatcctctgtgtgatagtttcacaaaacgatgcagtattaagttaggactctaagcgtcgctgttgaccaacctgggcaagaaaatcaacggaaactcaagttacatcctccaacaacaaagcaaattagacgggaaagcaggaaagctgtgcagaaattctgacctgaaacgcttcgcatccggtctctgcttgttgaaggaccttcaccgctatttctgagaagagcaaaagtgatgcagatctgttcttcctcttcttaatcccagagaagttcctaataagccagtaatggcgcctccgcagaggcatccgcagcgcagcgagcaggtcctgctcctcacgctcctggggacgctgtggggggccgcggcagcgcagatccgctactctattcccgaggagctggagaaaggctccttcgtaggcaacatcgtcaaggatctgggactggagccccaggagttggcggagcacggagtccgcatcgtctccagaggtaggatgcagcttttctctctgaatccgcgaaacggcagcttggtcaccgcgggtaggatagaccgcgaggagctctgtgctcagagcccgcggtgtctggtgagttttaacatccttgtcgaggataaactgaatctttatcccgtggaagtggaaatagtggacattaatgacaatacaccccgattcttaaaggaagaattggaagtgaaaattctcgaaaacgcagctccatcctctcgttttccactaatggaggtctatgaccctgatgtgggaatgaactcccttcagggatttaagctcagtggtaatagtcacttctcagtggacgtgcaaagcgaagcccatgggcccaagtacccggagctggtgctggagggcacactggaccgggaaggagaagccgtttaccgcctggtccttactgccatggatggcggcgaccctgtccgctcaagcgtcgcccaaattctggtaacagttctagatgtgaatgacaacactccaatgtttactcagcctgtctaccgtgtaagtgttcctgaaaacctgccagtaggcacaccagtgttggcagtgactgccaccgaccaggatgaaggagtccacggggaagtaacttattcctttgtgaagattacagaaaagatctcacaaattttctgtttgaatgttttgactggagaaatttcaacttctgcaaatctagactatgaggactcgagtttttatgagctgggtgttgaagcccgggatgggccaggtcttcgagacagagcgaaagtcttaataactatcttggatgtcaatgataatgtaccagaagtggttgttacatctggaagcagaacaattgctgaaagtgcacctccaggaacagtaatcgccctttttcaagtgttcgatcgagactctggcctgaatggcctggtaacctgttccatcccgagaagtctcccatttgaattggaaaaatcagttggcaattattatcgattagtgacaaatgcagctctagaccgggaagaggtattcttgtacaacatcactgtgacagccacggacaaaggaacaccacctctgtctacagaaacaatcatctctctaaatgtggcagacaccaacgacaacccgcccaccttcccccattcatcctactcagtctatgtccttgaaaacaaccccaggggtgcctccatcttctctgtgaatgcactggaccctgacgtggaccagaacgcccaagtctcctactcactggcagaagacaccctccagggggcgcccctgtcctcctacgtgtccatcaactccgacactgggattctgtacgccctgcgctccttcgactatgagcagttgagagacctacagctgtgggtgacagccagcgacagcggggacccgcctcttagcagcaacgtgtcactgagcctgtttgtgctggaccagaatgacaatgcgcccgagatcctgtaccccgccctccccacagacggttccactggcgtggagctggcgccccgctccgcagagcccggctacctggtgaccaaggtggtggcggtggacagagactcgggccagaacgcctggctgtcctaccgcctgctcaaggccagcgagccaggacttttctcagtgggcctgcacacgggcgaggtgcgcacggcgcgcgccctgctggacagagacgcgctcaagcagagcctagtggtggccgtccaggaccacggccagccccctctctccgccactgtcacgctcaccgtggccgtggccgacaggatccccgacatcctggccgacctgggcagcctcgagccctccgccaaacccaacgattcggacctcactctgtacctggtggtggcggtggccgcggtctcctgcgtcttcctggccttcgtcatcgtgctgctggcgctcagactgcagcgctggcacaagtcacgcctgctgcaggcttcgggaggtggcttagcgagcatgcccggctcgcactttgtgggcgtggaaggggttcgggctttcctgcagacctattcccacgaggtctcactcactgcagactcgcgtaagagtcatctgattttcccccagcccaactatgccgacacgcttatcaaccaggagagctatgagaaaagcgagcctcttctgataactcaggatttacttgaaacgaaaggagaacccaggcaacttcaggtgagtttctttccgcctaagcgggaagagtaatctgatcttcccgcaacccaactaatcagacaggctcatcagctagatcggctgttatagaagcgaacctcttttggtacaggaagattcgtgattttgtaaagtggaagactcccttgttcaggtgagggtatcgtttttttttttttttttttttgagacggagtctcgctctgtcgcccaggccggactgcggactgcagtggcgcaatctcggctcactgcaagctccgcttcccgggttcacgccattctcctgcctcagcctccctagtagctgggactacaggcgcccgccaccgcgcccggctaatttttttgtatttttagtagagacggggtttcaccttgttagccaggatggtctcgatctcctgacctcatgatccacccgcctcggcctcccaaagtgctgggattacaggcgtgagccaccgcgcccggccgagggtatcgtttttattggttgacaggaaaattcaagattgtctttgattagtgcttagttttcttagccctttgcagagagtcacataattctaatgtttttcttttatatcaaaagaatgttctgaagtcttaattttgtgggggaaaataatgcatgtcctagtttttctttacctttctcttcttggcaaactatttgtgtcttggattgagtacatctcgtttcttaggttttttcctactatgtgacatttgtaaggttctttctttttctaatgtgggaaaaaaaataaccttaatttaggtcagtgttaaagatcaagatcttggttttagctagcatggtggttcacgcctgtaatcccacctcttcaggaggctgaggcaggaggatcccttgagaccaggagtttgagaccagcctgggtgactctgtctctaccaaaaagaaaaaaaagtagccagatgtgtggcgtacacctgtagtcccagctactcgagaagctctgataggaggattgcttaagtccaggggtatgaggctgcagtgagatataattgtgtcactgcaccctagcctgggagacagaatgagactttttctctctctctctcaaaaaaaaaaaaagattttgttttttctcagtgttacttgataactataaacgacagacgttcatacaagagatctttcacctttactacttaggaatcaaaaattatttttgaaaagataagaatcattggtaactgcagcaggggacaccagatctttggtgttaaaagacctgaataacattcctgtaactatctgttatttacttgggccagttacaatcgccattatcttccaattaaaattaagatttaaaagacttctcttatcagagataggatccccctctgttgcccagtctggagtaaaaatccacctgtaactgctgcttatagagtgtgtatccagggcaacttgaatctatgttcctgggttgcaatcctaaagcttggctcaaataagctctacttatattattttttaaaacaagactttccttatctatctgactcaaattctaagaaaataattttataactttttttcaaactctaaagcagcatagtgaacacgtatttgttgacatcaccattattataattattgggttgttaacaataactaagcaccgatgctgtgtgcctactacagtgtcttttgcatactgtgtgcctgatagtatttaagagtgaaaatggccgggtgcggtggctcatgcctgtaatcccaacactttgggaggccaaggcaggcatctcacgaagtcaggagttcgagaccagcctgaccaacatggtgaaaccccgtctctactaaaaatacaaaaattagccaggtggggtggcatgggcctgtaatcgcagctactcgggaggctgaggcaggagaatcgcttgaacccatgaggcagaggttgcagtgagccaagatcgtgccactgcactccagtctgggtgacagagcgagactctgtctcaaaaaataataatgataattaataaataaagagtgaacatgaattttaaaacatgctcggtagtgtctgcttacaggacatatctctaaaaatagatgactgactggtgaatgggagaacaaatgttaatgaggttcaaataaaaatttaaatattttagcattttaacccagacaataaggctttcatcatataggaactctttattgaaatatttcaagaaaaaagggattatcatttagaagactgattagtcttatttattatgactgaaatgtgcaaacagaatcattgtttcatgaacagaaaacagcagagtttttgactgtcaatgatgttcgaatagaaaatggatcactaaggagataggagattctgttatcgacagtcttcaaaagtaagttgatggccctggaatgaatggagtacaggggattctctaatttgatgacttgttgaactacattatagtcaagatttttctccagtcatgagttggaagattctacaatctggtggtattatagaatggattggccacttgtgcatctgaatttgttatgaatgtgtaagaaaaaagcaattgagaagataccttgaaaataaatgagaacctcctttgtaacctgactttgtcagtcttcttaaagataacattgagttgatgtgtttttaaataagctgctaagagtaatatgtgtttttctgaaccaatattgtggtatttacatttaaggaattgttatagatttatttatttcaagtttccaaaggtatatacctaaacaagagatctaatcatacacatcttcaaagctcattttcttgtatctttgtgatataatttgataaaataacaattttaaacaacttgaatcttggatattagtctcatgagttagatgggctgttatacatatgattatttcataaactctgaaagtgtgaatgttattttactatactaccaatttgggatgttaaactacatcttgagcatttgttgttatagggaaagctcactaactacttttcatggagatcaggctggtttattttattctcttattacctgtgaccatttcatttaaacaaataaaatatttctctgatggaaaaactaccaacttctactctcacaaaagtcattcactcatgtggactgaccaactgttaaacatcctggcagtcatggaatttgctaagttatggctaaatgaggttctttaatccacctgcaatacagatcattaataataagataggctatctgaggttttgagagttcagtatagaattttgaagcatcaggaaaaaaaactaccaaattattgtcttattcttattttatggtctgtgaaagcctcttttttttttttttttttttttttttttttgtcagagtcttgctctgtctcccaggctggaatgcagtggtgtgatctctgctcactgcaacttcctcctcctgggttcaagcgattctcctgcctcagcctcccaagtagctgggattacaggtgcatgccaccatgcctagctaattttcatacttttagtagagatggggttttaccatgatggccaggctggtctcaaactcctgaccttaagtgatccacccgcctcagcctctcaaagggctgggattacaggcatgagccactgagcccggcctgaaaggcattcatttctgatcaggcttctgttgaggtggcaattgtcaaaggggaaggagtaaaatctcagaggagaaacattggaagatacctatatctttgcttgagaatgaaaatctaaatggaacttcaaagaactgttttgttgtttgttttttagaaaaaaaagtcccaaaaaagaaaagagagaagataatcaattcgatgcccaggaagccaaatagactttacatagaattctttttaatgcaaccaaacaaatggtcaggattcttcccaatatctcagtcaacaataatatacactctttaaactatgaaatgatttcaatttgatacaatgagcttatgttagattttattaaacatatcttggcggtctagtaaagatctttaatatttaattttatgatgttcgataacttagaaaatgtgaatgctagagacaatgaagccatttactccatagggtatgtatgctttgtgttcggagtagtctataatttaatttaactagctcttatttccttttctccaaagaaggtaccaagacactataaattaattgagacttttttaaaacagtagaataagaaacaaatgtgagatgaaactatgaattttgaggcatcaggtaaaaatggatcaagacattgagagctataacctccaaacatgaaagtttgtttgaaaatatctacaagtgcttacattgtttaataatcatacactttgcttgcctcaacaagaagttcaaaagtactattaaacaaatagaatttaactccagtttacagaattcatctataatacctctattagttcctttaaacaaaatttatctactttgtgaatgcaaagataactatggattattttgatagatcaaaacagaatgtccttcaaagtgttccctgtattctggagcaatgccaccagaaagcagaaataggttacttaggagcctcccacaaaacgaagttaagctttcttagtgttagttctggattctcctcctggttccaccaactactctccaggacctagaagaatttacaaaccaagactgtttcttgccaggtctttattccagagcaggtcattctcttttattctgcaactatgtgaaaggagctttcttttctttctgctagcagagggtagcctcggatccatcaataatttagttttactctatcaacatcagtggagagacgagtacctctaaggatcctgtcaggacagtcctgcattttgctcaaatgctgtctagagatccctgttttctcaattacactagaatagagtaggatgaagatttgaattgcatactaggatgaagacttgaattgaattgcataatgaaaagaatcagccaatccattatccagtttcttatgaattcacagcccagtaggatctctgcagatttctgccttctgtagaaaatgggttgcttctatagctgattgctgcagccaagacaaacaacgatttctttctttttttctcacaagactgggagtgagaatatttggattccgacattgttctactactatataatcaataatcaggaacaaggcaaggcaattccctctttctttctttctttctttcttcttcttttttttttttttttttttttggcagagttttgctcttgttgtccaggctggagtgcaatggtgtgatctcggctcaccacaacctccacctcccgggttcaagcgattttcctgcctcagcctcctgagtagctgggattacaggcgcgcgccaccacgcccggataattttgtatttttagtagagacggggtttctccatgttggtcaggctggtctcaagctcccgacctcaggtgatccgcccgcctcggcctcacaaagtgtgggattacaggcgtgagcaacagcacctggccccccctctcattttttaaacggttaaaatgaaggtgttagaccgtctctaaggttctatacaatcaaaaatttattaaaataggtctatatattttacaacaattttgactttctgaatcttgcatcatggtgtctagaacatatgtgttcaattaatactgaattaattaaaatttatatacactgatgtaaatattttctaagtaaaatctttcatatgtatttaaataaaatttacctttttgccttcaataactgattttcccatgtgcaataacgtgtgagtcagtgcccaaaagagtcacttgaaagttgcaaggcaaagcagttttttaaaaattatctaagattatcaaacaccggtccatgaacactgttgcattaattcagtgtcttaaaatggatttttaattatcagggatatctagagcaaagaaatctaacagggaaattttgaaagatgaaacaattttctatgaaatcagtgtattgtgtgcatcaatgtggtgcagtaacttagtaaggactcacagcgccgctgttcaccaaccagggaaaaatggtgcgagagatcccacagaaaccaccgagttttacagcacagagaaacgacagattgcgataagccctcttccaggctgcactaaactcaagcctctatcctgctggattctgagctccccttcctaagacagaggggtccacccggatacacccgcattctgaagcacttcccgagatcggcgcctaagcaagagaagcaggacgactatggcggctcagccgaggggcggggactacagaggattcttcctgctctccatcctcctggggaccccctgggaagcctgggcaggacgtattctctactccgtgtcggaggagacggacaaagggtcctttgtgggagacatcgccaaggacctggggctggagccccgggagctggcggagcgcggagtccgcatcatctccagaggtaggacgcagcttttcgccctgaaccagcgcagcggcagcttggtcactgcgggcaggatagaccgggaagagatctgcgctcagagtgcgcggtgtctggtaaactttaacatcctgatggaagataaaatgaatctttaccctatagacgtggaaataatagatattaatgacaacgttccaagattcttgacggaagaaataaatgtaaaaataatggagaatacagctcctggggttcggtttccgttaagcgaggctggggatccagatgtgggcacgaactccctccagagttaccagctcagccccaatcgccacttctccctggctgtgcaaagtggagacgatgaaactaagtacccggaactggtgctggagcgggtgctggaccgggaggaagagcgggttcaccacctggtcctcacagcctctgatggcggcgacccgccccgatccagcaccgcccacatccaggtgacagtggtggatgtgaatgaccacacgcctgtcttctctctgcctcagtaccaagtaactgtccccgagaatgtgccagtgggtacaagactgctcacggtacatgctatcgacctggacgagggagtcaatggggaagtgacatattcttttcggaaaataactcctaaacttccaaagatgtttcatctgaactcgcttacaggagaaatatcaactttagaaggattagattatgaagaaactgccttctatgaaatggaggttcaggctcaagatggtcctggtagtctgacaaaggcaaaagtactgatcacagttttagatgtaaatgataatgctccagaagtgactatgacgtctttaagtagctcaatccctgaagacacacctcttgggacagtcattgctcttttctacctacaagacagagattctggaaagaatggtgaggtgacctgcaccattccagaaaacctaccttttaaattagaaaaatcaatagataattattatagattggtcacaaccaaaaacttggaccgggaaacactctctttgtataacatcacactgaaagccacagatggtggaactcctcccttgtccagggaaactcacatattcatgcaggtggcagacaccaacgataacccacccaccttcccccactcatcctactcagtctacatcgctgagaacaaccccagaggggcctccattttcttagtgactgcacaggaccacgacagtgaggataatgcccagatcacttattccttggccgaagacaccatccagggggctccagtgtcctcctatgtctccataaactctgacactggagtcctgtacgcgctgcaatcctttgattatgagcagttgagagaactacaactaagagtgactgcacatgacagcggggacccgcctctcagcagcaacatgtcactgagcctgttcgtgctggaccagaatgacaacccgcccgagatcctgtacccggccctccccacagatggttctactggcatggagctggcaccccgctccgcagagcccggctacctggtgaccaaggtggtggcggtggacaaagattcaggccagaacgcctggctgtcatacctcctgcttaaggccagcgagccaggactctttgcggttgggctgtacacgggcgaggtgcgcacggctcgggccctgctggacagagatgccctcaagcagagcctcgtggtggccgtccaggaccacggtcagcctcctctgtcagccaccgtcacactcaccgtggctgtggctgacagcatccccgaagtcttggccgacctgggcagccttgagccctccgacggtccttacaactatgacctcacgttgtacctggtggtggcggtggccacagtctcctgcgtcttcctagccttcgtcctcgtactgctggcgctcaggctgcggcgctggcacaagtcacgcctgctgcaggcttcagaaggtggcttggcgaacgtgcccacctcgcactttgtgggcatggacggggtgcaggctttcctgcagacctattcccatgaggtctccctcaccgcggactctcggaagagtcacctgatcttcccccagcccaactatgtagacatgctcatcagccaggagagctgtgagaaaaatgattctttgctaacatccgtagattttcaggaatgtaaagaaaacctgccaagtattcaggtgagcccagcccttcctttatttccatgaggaatttatttgcatgatatttctctattattttgcaaaacaaatgttttgaaaatagggatttaaaaaactttatagaggtaaaaatgagtttaccagtttccttcagtggtgacactttaatatagaacacataggatatagtatttctttagtgaaagcctatggacaagattatgaatatgtggactatcacattttataatttccacctactttccaatctatgttccaacctactttcttaactcatatattttatacattggaatgaatcgagtctttcatattgcacaaggttagcaggaataaaacacacctcagctgtcttctcaggattctctttagcattcaaatatgtaaaaggttctgaaagatttcttccatgtgaagatttttttctgtggctgattctgcctccatgtacctcagcttggtggtcctaaaaaatcttgattgcttcttgacctatttacagtataatcatttattaatggggtggtagtagaaggttggatttatgcctaaagaatgaaatgtgtgtgtatcacacttcactaagatctatatcaaagacagacatcaagtctaatgccacactaaaggccatcggacaaaaccaataaaatatgtcaaataaaatgtcattttaagtgttgtaattggcatttgtgacataggcaattacatgttttaacagagaattccagtatgttgttttagtggtacagccagatgaagtgtgtctgtgggctatcaaagtgggagattggggatactggctttgtttcaactgtctcacgtactcaaaccttagaccatcttatgtacacagatcctagaccagtagttgattttatttattaggtctactgaaaaattcagttggaaataacccaatctgggattaactacttccatattcttttgtataacattttagtaaagctcagtatatcaagtgattgtcatccagaaggggtggatgacaaggtaatcttgattccagagacctttgagtattaattaaaaacacacttttagccaggtatggtgttgcaagctgtagcccacctgcatgggaggctgaggcaagaggacagcttgaacccaagaattggaggcccacctagataatataacaagactctgtctcttcaaaaaaagactctttttagactagtgttgtatttggtagtattttgcacatgatagactctgtacaatagtgtgggggatacattttttttttttgacatggagtctcgctctgtcacccaggctggatacattttacaagttctgcagtgttcacatttcagatgtacaatcacttggggtagaagacaatgttgctgacaccaacaatgttactgagggaagatcctatggcagaactacggttataaggtattttgtaaaagaaaatctcctgaccaaaatttattagatgcataaaattgtttttaagcaatggagagacataatcactaaactcagtgagctattgcaatcaaactttccagggattgtttccttcaattcagaggtcaccaaggaatgtaaaataagtgcagaggtaggaagcagtgcttcagtgcagcagatctcagtgactttgtgttttgaggctatgtattatccccctgataactttgaagatgaatgttgtatttcataaccagtaaaataattgtgtaatgaggagaggagtaggctactgcctgtgatcatcgaaatgagaatcacataatattcctgtaatgaaatcactgaaactattgggaagggggtgtatttgaagataagtataaattgcaccttctaaaaggcaattttggtattactgatactctccggaaaaagttgaaataaatcaacttggaggtacttagaaaagtggagaaaatgttaggaacaatgaaagaaagataaaatgtatccagtatatttctaatgagtaagtatggaaaattactgtactctgagacggtttaggccaagtctgtgttatggctatctttatatagatagtgcatgtttgaagattggggaaagcttatgtcaataaatgtttatgtacttaatctacatgatttgcctaaaaatcctcaaagttgggatgaaggcattcctaagagtacatttttagacgtcattaaatatacagacgtatccacgtagtttttgttctttcagttaggcacacaattataattattgcactggttaacttgaagcagcagaggctgtagtttcctagtgctgactctgggcgccgctgttggccaaagtggagagcttggcgctccagatctcctcgcgcagccgcagcgcgctttccagggcagccccagctcagactccccagcgccagcctttacaccgcttcctcctcggaaaaagaagaattttttcttgaactggaactgcaactaaagtccgttcggagatccaaaaatctgcaatacagaggttatttgtaacccggcgtctccaggctggtgagcaagctgaggagagcaagagggatggggagcggcgccggggagctgggccgggctgagaggctgccagtgctctttctcttcctgctgtctttgttctgcccggcgctctgtgagcagatccgctacaggattcccgaggaaatgcccaagggctccgtagtggggaacctcgccacggacctggggttcagcgtccaggagttaccgactcgaaaactgcgcgtcagttcggagaagccttacttcaccgtgagcgcagagagcggggagttgcttgtgagcagcaggctagacagggaggagatatgcgggaagaagccagcttgtgctctggaatttgaggctgttgctgaaaatccactgaacttttatcacgtgaatgtggagatcgaggacattaatgaccacacgccaaaattcacgcaaaattcctttgagctgcaaataagtgagtctgcacagcctggcacacgatttatattaggatctgcccatgatgcggatattggtagcaacacactgcagaattaccaactcagtcccagtgatcatttctcactgataaataaagagaaatcagatggcagtaaataccctgagatggtattgaagacacctttggacagagaaaagcagaaatcctaccacttgactttgactgccttggactttggagctccacccctaagcagcactgcacagatacacgttctagtgactgatgccaatgataatgctccagtgttcagtcaagacgtatacagggtgagcctttcagaaaacgtgtacccggggaccacggtgctacaggtgactgccacggaccaggatgagggtgtcaatgccgagattactttctctttcagtgaagctagccagatcacccaatttgacctgaactctaacaccggggaaattactgttttaaatacattagattttgaagaagtcaaagaatattccatagttttggaagcaagggacggtggaggaatgattgcgcaatgcacagtggaggtagaagtcatagatgaaaatgacaacgccccagaagtgatattccagtctctacccaacctaattatggaggacgccgagctgggaacacatattgctttgctcaaagtccgtgacaaggattccagacacaatggagaagtgacttgtaaattggaaggtgatgttccatttaaaatattaacttcttcaagaaacacgtataaattagtgacagatgctgttctagaccgcgagcagaatccagagtacaatataaccgttacggcaacagatcggggcaagcctcccctctcctccagttccagcatcaccctgcacattggtgatgtaaatgacaacgctccggttttctcacagtcttcctatatagtccacgtggccgagaacaacccgcctggagcctctatttcacaagtcagggcttctgatccggacttggggcccaacggccaagtctcttactgcatcatggccagtgacctggagcagcgggagctgtcatcctacgtgtccataagcgcggagagcggggtggtgttcgcgcagcgcgccttcgaccacgagcagctgcgcgccttcgaactcacactgcaggcccgcgaccagggctcgccagcgctcagcgcgaacgtgagcctgcgcgtgttagtggacgaccgcaacgacaatgcgccacgggtgctgtaccccgcgctgggtcccgacggctctgcgctcttcgatatggtgccgcacgctgcagagcctggctacttggtgaccaaggtagtggcggtggacgcagactcaggacacaacgcctggctgtcctaccacgtgctgcaggctagcgagcccgggctcttcagcctggggctgcgcacgggcgaagtgcgcacagcgcgtgccttaggcgacagggacgccgtccgccagcgccttctggtcgccgtgcgtgacggtggacagccaccactctcggccactgccacgttgcacctggtcttcgccgacagcttgcaggaggtgctgccggatatcactgaccgccccgacccctctgacctccaggctgagctgcagttttacctagtggtggccttggccttgatctcagtgctcttcctcgtggccatgattctggccattgccttgcgcctgcgacgctcctccagccccgcctcctggagctgcttccagcctggtctctgtgttaaatccgaatccgtggttccccccaactacagcgaggggactttgccttattcctacaatctatgtgttgcacatacaggaaagacggagtttaatttcctaaaatgtagtgagcagttgagttcaggacaagacatactttgcggtgattcatctggggccttatttccactttgtaattccagtgaattgacttcccatcaggtgagtttcctttaagtataatttaatgctcattgcctacccatttctccatattcacaagaaaatatacatatttgcaggaaaatatataatttttagatgtcatggatcattttaggaaagttgtagtcagttaaaaagctgtcatatcattctacaaaggaggagtaaagtaggagcaattgtgtggcccaacatttgtttgttttttagccaagcttagatttataaagcaatgagggtgtggttttaaccacaaagtgaaagtgttagacagttgttggctctctcctaaaaagtgaatgagatttttcctatacattttccttcttgttgactaatatatgatgaatacttttttcagcttggatataccataaatataaaaataataaagccaaagaatttaagctaaaattcaacacttttcttaactaatttaactggtatggtctccatagtagtccactgttttgtttcctgtgttaacttcccttttgtttcaaaagctcttagaataaggagtcaactggatttttatgtccatggaccccttgtgattatatgcagtgtacgctgtgtgtgcgtgtgtgtgtgtgtgtgtgtgagagagatccttttacttagaaaaaggtctactatgctcattagaagatcaaaagcagattctccttacttgtaacataggagtttcaggattaatctgtattcaagctcattctatatccttcatcaaagaaaagacaatgttttgtgtctgttgtccctctcacacacagccctaatatataatgtgtaactgccttatctgcagccctaaactaatatagctagaggtcttctaatcattctcctacctctaggaaagaaatatagtcttgaaaactgccaatctggtgtgcatacaaaatatatacaaaataccaaggaacattatatgagccttttgctaggtatatctaagcaactgcttcagttaatggccactttacaaattgctgaaagaaggaaacgtctttcgattcttttttttttctttttttttttttgagacagagtctctgtctgttactcaggctgtagtgcagtggcacaatgatagctccctccagcctcaaactcctgggctcaagcattccttctgcatcagcctcctgactagctggaactcaggctcatgccaccagacctggctaatttttctgttttcagtagagaaaatattttctttcactaatttaactggtatggtttccattgtctacccagttttccatatgcataagaaaatatattcacaggaaaatataaagttttcagatttcatgagtggttttaagaaagttttagtcagtgaaaaaactatcataccagtcttcaaaggaagggtgaaataagttcatctgctacgttgcccaggctggtcttgaagggaaacagacttttttgtagtcatacttatcctttggcttcttagtaagtattatatagtcattactttttgcagttttttagatcaaagtgttaatgtaggtaaagttaattttagaatatatgtaaaagtcaagtctgctttaaatttaatcatctctttggtgaaagggatgggatggagctttgctttttatcatatattcatctgtacctttcaagtattcaaatagaaaaatataaacaatgtaaataaaatagcaaaacaatgtaatatctcataaaactgcaatggtaaaagcatttatcctattgaaattccacaatttttatttgaaaatattatcgacatgtaattcaagtggcatttagaagaataatttaaaagcaacaactctatagaaagcttgtaaaatgattaagtagtttaaaccaaataaaacaatttctgagtcagtcatctccagtaggtctattttagtctcaagataaattcatttctggtgacaactgaagttcttagttatttgttagtatatattggagacatttacaataaagcttagagcacaatgggaaatgaaagtatcatgttttttttaagaccaaatgtattgcagaaatgtgagtaatttaatccgatgctacaatctgatcattctgatctaatctgatcatttaataacactaaataaaaccttcatctcacattctttggctgtttcttttaaaatatgggtttacggataaatcaaataaattcaaaacaaagtaataagcaaatgatttttttttctcagtaatctagtagagtattacatttagaagtaatctgtatctcagtgcagtaactatttaggactgtaagcgccgctgttcacctactggaagacaaatgcaaccgaaaacactcagatctcacacctcacgaagacccgcagatgccacaaactaactgctggactgcagcgaaacccgacccctgtttggaggcactccaggtttccggaggattgtcatctccatagctgcggcaagaaactaaataagacccatttatgcacagtgaagattctgagaggattctgcagcaaaacaacaatggccgctccacagagtcgccccagacgcggcgagctgatcctgctgtgcgcgctgctgggaacgctgtgggaaatcgggaggggacagattcgctactctgtgccagaagagacggacaaaggctccttcgtgggtaatatctccaaggacctggggctggacccccggaagctggcgaagcacggagtccgtatcgtctccagaggtaggacgcagctctttgctctgaacccgcgcagcggcagcttgatcaccgcgggcaggatagatcgggaggagctctgcgctcagagcccgcggtgtctgataaatattaacaccctggttgaggataaaggaaaactctttggggtagaaatagaaataattgatattaacgataataacccaaaattccaggtcgaagatctagaagtaaaaattaacgaaatcgcggttcctggagcacgttatccactcccagaagctgttgacccggatgtgggcgtgaactccctccagagctaccagctcagccccaatcaccacttctccctggacgtgcagactggagacaatggagccataaacccagagctggtgctggagcgcgccctggacagggaggaagaggctgctcaccacctggtcctcacggcctcggatggcggcaagccgcctcgctctagcacagtgcgcatccacgtgacagtgttggatacaaatgacaatgccccggtttttcctcacccgatttaccgagtgaaagtccttgagaacatgcccccaggcacgcggctgcttactgtaacagccagcgacccggatgagggaatcaacggaaaagtggcatacaaattccggaaaattaatgaaaaacaaactccgttattccagcttaatgaaaatactggggaaatatcaatagcaaaaagtctagattatgaagaatgttcattttatgaaatggaaatacaagccgaagatgtgggggcacttctggggaggaccaaattgctcatttcggtggaagatgtaaatgacaatagaccagaagtgatcattacgtctttgtttagcccagtgttagaaaattctcttcccgggacagtaattgccttcttgagtgtgcatgaccaagactctggaaagaatggtcaagttgtctgttacacacgtgataatttaccttttaaattagaaaagtcaataggtaattattatagattagtgacaaggaaatatttggaccgagaaaatgtctctatctacaatatcacagtgatggcctcagatctaggaacaccacctctgtccactgaaactcaaatcgctctgcacgtggcagacattaacgacaaccctcctactttccctcatgcctcctactcagcgtatatcctagagaacaacctgagaggagcctccatcttttccttgactgcacacgaccccgacagccaggagaatgcccaggtcacttactctgtgaccgaggacacgctgcagggggcgcccctgtcctcgtatatctccatcaactctgacaccggtgtcctgtatgcgctgcaatctttcgactatgagcagatccgagacctgcagctactggtaacagccagcgacagcggggacccgcccctcagcagcaacatgtcactgagcctgttcgtgctggaccagaatgacaacgcgcccgagatcctgtaccccgccctccccacagacggttccactggcgtggagctggcgccccgctccgcagagcgtggctacctggtgaccaaggtggtggcggtggacagagactcgggccagaacgcctggctgtcctaccgcctgctcaaggccagcgagccgggactcttctcggtgggtctgcacacgggcgaggtgcgcacggcgcgagccctgctggacagagatgcgctcaagcagagcctcgtggtggccgtccaggaccatggccagccccctctctccgccactgtcacgctcaccgtagccgtggctgacagcatccccgaagtcctgaccgagttgggcagtctgaagccttcggtcgacccgaacgattcgagccttacactctatctcgtggtggcagtggctgccatctcctgtgtcttcctcgcctttgtcgctgtgcttctggggctcaggctgaggcgctggcacaagtcacgcctgctccaggattccggtggcagattggtaggcgtgcctgcctcacattttgtgggtgttgaggaggtacaggctttcctgcagacctattcccaggaagtctccctcaccgccgactcgcggaagagtcacctgatctttccccagcccaactacgcagacatgctcatcagtcaggagggctgtgagaaaaatgattctttgttaacatccgtagattttcatgaatataagaatgaagctgatcatggtcaggtgagtttagttctttgcttgcttttaatttccagatgaattttatttggcataaattatgttttgaaaaacattgtgaagatagttgaaaataatttttaaggtgtatcacagagttttgggtttattttggtggtgttactataaaattgaactctaatagtcataggttattgtttcatttgcttttaaacgacttggaaaagattgttcaaccattttaagccttccagtattttattcctattatcactcattcacttaagaagtagctacccgtccatactggtaattttgctattgtttgtgtgtgtgtgtgtgtgtgtgtgtgtgtgtgtgtgtgtgtgtgtgtgtatcccaaactagaacttcagaaaattatcaagaagtctaaagccttgttattagcttagcaaaagtaaaatatatctcagaatttttagggttatgtttagcatttgaacctgtaactaggctcttgtagatttcttcactttaaacctcttttctgagccctgtttctgtaccagtgcccttcaaaactttaatacttcttaccatccttcaaaacatgaacaaactttaaagatggatcttggtgggagatgagactggttactaaatattaagtatgtgagtcagtggtcacctgggctccatgcccatggagacatgaaatctaaagcctagaatgtccattgctcccccaaacaaaaaacaaaagcaaaaacattagatctgaattaaaatgtaattttaaactgttgaaagtgacttttgtaaaatatgtaagaacatatttcaatacaattccaattagctgtttcggttgtgcattgatgtgaagtggtgagaatgttgatattaagaaccaatgtttcaggtacacaagttctaaataagctgatcaattcaattaaagttattcagtcttggctggacacagtgcctcatgtctgaaatcccagcactttgggaggctggggcaggaggaccgcttgagccccgggggtttgaaactgcagtgagctatgatcatgccactgcactccagcctaggtggcagaactagaccctgtctctaaaaaaactattattaggccgggtgcggtggctcacgcctgtaatcccagcactttgggagactgaggtgggtggatcacctgaggtcaggagttcaagatcagcctggcaaacatggtgaaaccccgtctctactaaaaactacaaaaattagccaggcatggtggcatgcgcctgtggtcccagctactcgggaggctgaggcagaagaatcacttgaacccgggaggtggaggttgcagtgagcctcgatcctgtcactgcactccagcctgggcaacagggtgagactccgtctcaaaaaaaaaaaaaactaatattaatagtaaaaactcggtataggctatccattattgtattcctgcataccttcttgtagcatttgaataaagctaatacctgaattgattgttgtaaggtagaagtagatgacccaataaatgtttgttattaatgaaaaggacatttcctaaggattgtgtagtgttctactgtatggtgcatattcagtggagtgggagttaacttcatagtttgtgtaccatttggatgcacatttgagaggacaacatattattggcactttgcaattttaaaaactcggatgaaagttgccctggtaggaaagaaaatccttactctccctaaaaatgttggctagttgtttttattaatctgacaaatggactaaagaaggttgaccaatgtccacaaatttatgtaaatgaacttatgagcttcatttatccaattccaaagtcatttcagataggataataatgcaatccactagaatatccctttgtaccttgtattgcagaatagataagcatttccccaataactcttaagaatgaatttatgtactgtaaaagatatgacataagagaagtattttgagatatgaagaagagcaacgtagtagggtatatcatttcttagctacatcatatgggcagtatacttgaatgaatatttcctgaagtagaagagtaaagaaaaattatttttataaagaatgttaatatagtcaggaagaggagatgtttggggattggtataaaattgccacaactttacaaaatagttttaaatagtatagatttccctaatatgtgtaatataaaacactagaaatattggggagttggaaatcatagaaatgaacagaagaatgataaaattgtttccatagctaataaaaaatgaatttttgaaatcagtatagtatgaaggctctgagagcaagaactgtatcatattaattattatattgccagtgacaagggcaatacttagttctagctaagagttcaaggtatgtttgcagaatggtgaaagaatggaccaatgtatgcaggtttgtataaaaacccaacgtgatatttctaacaatttggaaaacagagaaagataccttaaagaagttgttataattttttattaagtatatggacgtaaaaacttggcttgttaagttaggcacacaaaaacaattactgcactggttaacttgaagccgcagaggctgtagtttcctagtgctgactctgggcgccgctgttggccaaagtgcagagcttggcgctccagatctcctcgcgcagccgcagcgcgctttccagggcagccccagctcagactccccagcgccggcctttacaccgcttcctcctcggaaaaagaatcgtttcctaaactggaactggaactaaagcccgttcggagatccaaaaatctacaatacagaggttatttgtaacctggcgtctccaggctggtgagcaagctgaggagagcaagagggatggggagcggcgccggggagctgggccgggctgagaggctgccagtgctctttctcttcctgctgtctttgttctgcccggcgctctgtgagcagatccgctacaggattcccgaggaaatgcccaagggctccgtagtggggaacctcgccacggacctggggttcagcgtccaggagttaccgactcgaaaactgcgcgtcagttcggagaagccttacttcaccgtgagcgcagagagcggggagttgcttgtgagcagcaggctagacagggaggagatatgcgggaagaagccagcttgtgctctggaatttgaggctgttgctgaaaatccactgaacttttatcacgtgaatgtggagatcgaggacattaatgaccacacgccaaaattcacgcaaaattcctttgagctgcaaataagtgagtctgcacagcctggcacaagatttatactagaagtagcagaagatgcagatattggcttaaactctctgcagaagtataaactctctcttaacccaagtttctcattaataattaaggagaaacaggatggtagtaaatacccggaactggcactggagaaaaccttagaccgggaacaacagagttaccatcgtttagtcctgactgccttggacggtggacatccacccctaagcggcaccactgagctccggatccaggtaaccgacgccaatgataatcccccggtattcaaccgagacgtgtacagagtcagccttcgggaaaacgtgccaccaggcaccactgtgttgcaagtgtcagccactgaccaagacgagggcatcaactcagaaattacttattccttctacagaaccgggcaaatctttagtctgaattcaaagagcggagaaattaccactcaaaagaaactggattttgaagagaccaaggaatattcaatggttgtagaagggagggatggtggtggactggttgcacaatgtacagttgaaattaatattcaagatgaaaatgacaatagcccagaagttacattccattctctacttgaaatgattctggaaaacgcggtgcctggaacactaattgctttgatcaaaatacatgaccaagattctggggaaaatggggaggttaattgtcaattacaaggcgaagtcccttttaagattatctcttcatccaaaaattcgtataagttggtaacagatggaaccctagaccgagagcaaaccccggagtacaatgtcaccatcacagccacagacaggggcaagccgcccctctcctccagcataagcgtcatcctacatatcagagacgtcaacgataacgctccggttttccaccaggcgtcctacttagtcagtgtacccgaaaacaaccctcctggggcctccatcgcgcaagtctgcgcctcggacctggacttggggttgaacggccaagtctcctactctatcatggccagcgacctagagcctctggcactggcctcttacgtgtccatgagcgcgcaaagtggggtggtgttcgcgcagcgcgcctttgactacgagcagctgcgcaccttcgaactcacactacaggcccgcgaccagggctcgcctgcgctcagcgcaaacgtgagcctgcgcgtgttggtgggcgaccgaaacgacaacgcaccgcgggtgctgtaccccgcgctgggtcccgacggctctgcgctcttcgatatggtgccgcgcgctgcagagcccggctacctggtgaccaaggtagtggccgtggacgcagactcaggacacaacgcctggctgtcctaccacgtgctgcaggctagcgagcccgggctcttcagcctggggctgcgcacaggagaggtgcgcacagcgcgtgccttgggcgacagggacgcggcccgccagcgcctgctggttgctgtgcgtgatggtggacagccgccactctccgccaccgccacgctgcacttggtctttgctgacagcttgcaggaggtgctgccggatatcactgaccgccctgtaccctctgacccccaggctgagctgcagttttacctagtggtggccttggccttgatctcagtgctcttcctcctggccgtgattctggccgttgccttgcgcctgcgacgctcctccagccctgccgcctggagctgcttccaacctggtctctgtgtcaagtctggacctgtggttccccccaactacagtcaggggactttgccttattcctacaacctatgtgttgcacatacaggaaagacggagtttaatttcctaaaatgtagtgagcaattgagttcaggacaagacatactttgtggtgattcatctggggccttatttccactttgtaattccagcgagtcgacttcccatcctgagttggtgagtttcatttatgtctattctttttcattacccacccaattttctgtatttacatgaaactatcgtacattttcaagtccaatgagttgtcttagggaagtcagagctgctcagaaagctgtcctaccattctttaagaggagcagtaaattgtgagtttttatgtcgcataaaagaagtagccttatagatttacaaagtagtgagagtttgctcttagcttcctctctagcaaaaacatttggtgcgtttttttgtcctctttctcaaagctaatgaattttacctattcgttgtctcattctttaacatgtttatattttattgtatgtagataaaccattaaatttaatgtatgtaatcatttaattcatcttttaaagcaaagaaactgctagtagatgtctttcttcactgatttcactggtagttttcatctctttcttatgttcctcatatatgctttcttattcctacctaatggatttatgattttttgaatctcctaaaattttattaaaaatactatatgttggctgggtgcagtggctcatgcctgtaatcccagcactttgggaggccgaggcggttggatcacatggtcaggagttcaagaccagcctgggcaatatggtgaaaacccgtctctactaaaaatacaaaaattagctgggtgtggtggcgggcgcctgtaatcccagctactcaggaggctaagacaggagaattgcttgaacctggcaggtggaggttgcggtgagccgagatcactccattgcattccagcctgggcaacaagagcaaaactccatctcaaaaaaaaggaaggagaaggagaggaagaagaagaaaaatactacatgttatgtgtatgagagagaaagagagagactgattcactgaacttagaaggtccaaatcatccaaataattttctaagtttatccaggttttcttggatgcaaaatccttttccacctctatataattaccagaagaaacttacaaaaaaaaggaaatgctattgcctgaatttctcttgctcggaatcctgacatattcttgaagaaggggaaaaagacaccggatttgtcttatcgtttggagctttaaatataaatgactggatgttttctcaacatccttgtaggatggaaggtgaatacaggattattccatttttaagacaaaaactactagtcttgtgtacatacaaagctcccattacatggtataagtcttttgcttggtttcccttagtatgtgattcagtaaatgggttccttacaaagtgctgagatttcttataataccacttacttttaacctttcagtagttttctttgttgtatattttgtgttctttttcccaaattattatataagtttaagtgatgcttagaataatgtttaagaccactttaaaattgcataatttattgatgaaggattaaaatagaaacttgcttttcagtgtatatgcatttgaatcattgaaacacagtctgtgcatgcattacatattcacattaaaaaactaagcatttttgaaatagcagaaaagtttaagcaattacaaaaatgtgaaaatttccaactttaatcctgttaatatttagcaatattaggcgagaacatctgtaactattgctgaattaatattacttttataatacaaaaatttaaaataaacgtttttccaggaattttatcatcaaaataaaccccagaaaataatttcaaagtggataatctatccttatatatgtattaatacaattatatattttacatttacaaatatataggtataaaaattaaaaatgaatgtacttccaaacaagattgcacataaaaattacttcagaaaattgttaagatacacagaaaaaattgaagcatcataaaaaggaaattataatagtttacatatctagaaatagagtgcaaagttctaccaagaataagaataaattaatattaagcaatggtttgtgattttataatacacttacagaaattttattccactttatttacaactcagatatctaaaaaatagattgcttttgaaatacaaatgcaagaaacaattggagaaatctaaaatcataattagaagagagtagtgttttctttatcagccatctgatataatgttacacatcagtgggtgtagtaacggcttaggactctgagcgccgctgttgatcaactctaagcgaaaatcaggactccatccggatttccagttctgcggctacacaaaacccggcagataccacaaacctgctcccaggctgcagcaaaactcagcctctttcttctaaggaaaagatcaccatactttgcagggtggaagaaagaacctgatgaagcagcgcgcacagagatccttttgagaaaattccaaagcgaggcagcaatggcagctccaaccaaatgccagctccgcggaagattagtcctgctatgctcgctcctggggatgctatgggaggccagggccagtcagattcgctactcagtgcctgaagagacagaaaagggctatattgtgggcaacatctccaaggacctggctctggagccccgggagctggcggagcgccgagtccgcatcgtctctagaggtaggacgcagcttttctctctgaacccgcgcagcggcaccttggtcaccgcgggtaggatagaccgggaggagctctgtgctcagagcccgcggtgtctggtgaactttaaagtcctggttgaagacagagtgaaactgtacggaatagaaatagaagtaactgatattaacgacagcgccccaaagttccaggccgaaagtctggaagtaaaaattaacgaaatcgcggttcctggagcacgttatccacttccagaagctattgatccggatgttggcgtgaactccctccagagctaccagctcagccccaatcaccacttctccctgaacgtgcagactggagacaatggagccataaacccagagctggtgctggagcgcgccctggacagggaggaggcaactgcccaccacctggtcctcacggcctcggatggcggcgagccgcgtcgctccagcacagtgcgcatccatgtgacagtgttggatacaaatgataatgccccggtttttgctcaacggatttaccgagttaaagtccttgagaacgtgcccccaggcacctggctgcttactgcaacagccagcgacctggatgagggaatcaacggaaaagtggcatacaaattctggaaaattaatgaaaaacaatctctgctattccagcttaatgaaaatactggggaaatatcaacagcaaaaagtctagattatgaagaatgttcattttatgaaatggaaatacaagctgaagatggtgggggattgaaagggtggacaaaagtgctcatttcggtggaagatgtaaatgacaatagacctgaagtgaccattacatctctgtttagcccagtgagagaagacgcacctcagggaacagtaattcttcttttcaatgctcatgaccgagactccgggaagaatggtcaagttgtctgttctatccaggagaatctatcttttacattagaaaattcagaagaagattattacagattgttgacggcccaaattcttgaccgagaaaaagcctcagaatataatatcacggtgactgcaacagacagaggaactccgcccctgtccacagaaattcacatcaccctgcaagtgactgacatcaatgataatccacctgctttctctcaagcctcctactcagtctacctcccggaaaacaacgccagaggtacttccatcttctccgtgattgcctatgaccctgatagcaatgagaattctagagttatttactccttggcagaggataccatccaagggtctcctctctccacctatgtctctattaactcagacactggtgtgctgtatgctctgtgctcctttgactatgagcagtttagagatttgcaaatgcaggtgacggcaagtgacagtggaagcccaccacttagcagcaatgtgtcattgagactgtttgttttggaccagaatgacaatgccccagaaatcctgtaccctgccctccccactgatggttctactggtgtggagctggcaccccgctctgcagagcctggctacctggtgaccaaggtggtggcagtggacagagactcaggccagaatgcttggctctcctaccgcctattcaaggccagtgagccagggctcttctcggtggggctgcacacaggtgaagtgcgcacagctcgggccctgctagatagagatgcgctcaaacagagccttgtggtggctgtacaggaccatggccagccccctctctcggccactgtcacgctcacagtagccatagctgacagcatcccagacatcctggctgacctgggcagtcttcagatccctgcagacctggaggcctcagaccttaccctctacctcgttgtggctgtggcagtcgtctcctgtgtcttcctcaccttcgttatcacgctgctggccctcaggctgaggcactggcactcctcgcatctgctgcgggctaccagtgatgggttggctggtgtgcccacctcacactttgtgggtgtagatggggttcgagctttcctacagacctattctcaggagttctccctcaccgctgactcaaggaagagtcacctgatcttcccccagcccaactatgcagacacactcatcagccagcagagctgtgagaaaaatgagcctttgtgcgtctctgttgattccaagtttcctatagaagacacccctttggttccggtgagttcattttttttctttctttcttttctttttttgttttttgttttgttttgtttttgagacagagtcttactctgttacccaggctggaatgcagtggtgtgatctcggctcattgcaacctccgcctcccaaattcaagcgattctcctgcctcagcctcccaagtagagtagctgggactagagtagagtagctgggactacaggcctcccaagtagaataactgggactacaggcacgtgccaccacgcccggctaattttttgtgtgtttttagtagagacggggtgtcaccatgttggccaggctggtcttgaattcctaacctcaagtgatccacccacctcagcctcccaaagcactgggattacaggcgtgagccactgcgcctggcccttaactttctattatagttagctttctctttaactgtctgtacttaaggtagtataagttgatatcagtgtgtttctcatcacttttcactgggcctaattgttgctccaacactgaaaggaggcatttattagttatatttgctgatataactttcatgttctcataataattaacctgctgtcaacgtaaaccatacttcatggggtagctctcagcctgcattgatgtgggctttttgggtagggttgcttcattggttgcagtggactcatatcataaaattcttactcctttttttttttttttaagagatgggggtgtcattctgttgtccagggtggaatgcagtggtgtgggtaaagcttactgcagtctcaatctcctgggcttatgcaatcctcccacctcagccttcacagtagctaggactgaggtgggagggctagcaagctatgttgcccagactggtctcaaacgatcttcctgcttcagtttcccaaagcactgggtgaggtgtgaaccacctcacccagcaaattcttactcctacgatcatttattcaggtcatactatgtttgtaagggtaaactgataaaaaggtaaatgtattcttcttagagaaacagctgaaagcccagatttattgcttctattcttccatttctatgacaggaaaacacctctttgaggttatatttttcagatcacaagtgtgtaaagtctgtttgtgtttacagatattttctgacgaagattcaaacttcagttatccacttccaaaccctagtaaaccaattttttccctttaatggtgaaagttgtcacatcttttattctcatatcttcaaaggtcttaatttcctaatgctttaatgttaaattatggagaatagtaggacattcttcttttctatagtatatgcttgctcaagagaagtttctaagactggacactgtgaaatgacaaaacaaggaattaaaaatatttctctcacttatatattatttctggctcaattctccaacttttgagtctagaaatgaacttgcatatcagatataatttaagaaaatattctcaggaactgctgggaagattctaaaactattttactgtttttagctataaggaagagaataatgtattatttaatgttattttaaacatagtgttgtttcaaatagtaaataacatttcacaagacatttgaaaataagctttgaagttgactcaaaattctatgctaaacatgtgatccatagatacactgatgactgctggcatttctgtggaaatgaagaattgttttatttgtttgtaattatttgggtttcagttgctttatttttaagaaaaaaaagctgaagtgtctgggaatcctttatgacatacagacattttaattatttcaaacacgttttcccccttaagtgggtagcaaaaaaaataaagcatacttcaggctcatatttttaaccatgcaacaagaaaattgttacaatttctgttctgaggagtagccttcatacttagtatttataaatattgaaatgtatgttaatttggggaaaacataacagatatccatgaaggcttgtatgtcatggtaggtagttactattcgataccacaaaaatgtctcttgcccttaaaaccagaacacgaggctcaccagacagatgactgaatggagtatggaaaatctttatttctgtttttcttaggctatgtaggacttaacttattgtgcattggtaacagattgtagaacataagctgaaagataaaattcttgaccttaatgtctcatcttaaaaagaagcattggttgacattctatatctcgtattacttaaaaataatgggggagcgcagtatatattaaacaaagattggctttgtggtgatcattgttgaaggtggggtgatggctatgtgaaggttcactatatatactccctactgttgtataagtttgaaattgtgcataatagatttatttaaaacacaaagcatagaaatatctactataatattatggtgagagcaaaatttgagggggatgtacacctgcattttcgaagaatatatacatttcggagaccgaattcaaaatgaaaaaccgggctgctgtcccgcacggagcctctgggcgccgctgtcggccagtgcagagcaagcgctgacgccggggatccgtcagcctctggcctgggattccctgcgcagccaacaacagaaagaagaaaaccagctcccacacagagcctcccggctgcgcagacctttcccagcacagcggattgccagctccgagacccgggactcctcctgtcctgggccgaatgctcttttagcgcggtagagtgcactttctccaactggaaaagcggggacccagcgagaacccgagcgaacgatgggagggagctgcgcgcagaggcgccgggccggcccgcggcaggtgctatttcctttgctgctgcctttgttctaccccaccctgagtgagccgatccgctactcgattccggaggagctggccaagggctcggtggtggggaacctcgctaaggatctagggctcagtgtcctggatgtgtcggctcgcaagctgcgagtgagcgcggagaagctgcacttcagcgtagacgcggagagcggggacttacttgtgaagaaccgaatagaccgtgagcaaatatgcaaagagagaagaagatgtgagttgcaattggaagctgtggtggaaaatcctttaaatatttttcatgtcattgtggtgattgaggatgttaatgaccacgcccctcaatttgataaaaaggaaatacatttagaaattttcgaatctgcatccgctggtacacgactatcgcttgaccctgccacggatcctgatataaacataaactcaattaaagattataagataaactctaatccttatttttcattaatggttagagttaattccgatggtggcaaatacccagagttatctctggagaaactcctagaccgggaagaacagagatctcatagcttgatattgactgccttggacggaggggacccaccaagaagtgccaccgctcacatagaaatttctgtcaaggataccaatgataaccccccggttttcagcagagacgaatatagaattagtcttagtgaaaatctgccccctgggtcccctgtgttgcaagtgacagccactgaccaggatgagggggtcaatgctgagataaactactacttccgaagcactgcccagagcacaaaacatatgttctcattggatgagaaaacaggtatgattaagaataaccagtcatttgattttgaagatgtagaaaggtacaccatggaagtggaagcgaaggacggaggtggtctctctacccagtgtaaagtaatcatagaaatccttgatgaaaacgacaacagcccagaaataatcatcacttctctctctgatcagattttggagaattcacctccaggaatggttgttgccctcttcaaaacacgggatctggatttcggaggaaatggagaagtcaggtgtaatatagaaacagacattccattcaagatttattcttcttccaataactactacaaactggtgacagatggagccctggaccgagagcagacaccagaatacaatgtcaccatcgtagccactgacaggggcaagccgcctctttcttccagtagaagcatcaccttgtatgtcgctgacatcaacgacaacgccccagttttcgaccagacgtcctacgtggtccacgtggccgagaacaacccgccaggagcctccattgcgcaagtgagcgcctctgacccggatttggggctcaatggccacatctcctactctatagtggcgagtgacctagagcccctggcggtgtcgtcatacgtgtcagtgagcgcgcagagcggggtggtgttcgcgcagcgcgcctttgatcacgagcagctgcgcgccttcgcgctcacgctgcaggcccgcgaccacggctcgcccacgctcagcgccaacgtgagcctgcgcgtgttggtgggagaccgcaatgacaacgcaccgcgggtgctgtacccagctctgggtcctgacggctccgcgttcttcgatatggtacctcgctctgcagagcccggctacctagtgactaaggtggtagcggtggacgccgactcgggacacaacgcctggctgtcctaccacgtgctgcaggccagtgagcccggactcttcagcctggggctgcgcactggggaggtgcgcacggctcgagccttaggcgacagggacgcagcccgccagcgcctgctggtcgctgtgcgtgacggtggacagccgccactctctgccaccgccacgcttcatctggtcttcgcagacaacttgcaagagatactgccagacctcagcgaccgccctgtactctctgacccccaggctgaactgcagttttacctggtggtggccttggccttaatctcagtgctcttcctcctcgccgtgattctggccattgccttgcgcctgcgacgctctctcagccctgctacttgggactgcttccatcctggtctctgtgtcaagtctggacctgtagttccccccaactacagtgaggggactttgccttattcttataatctgtgcattgcacatacgggtacaaaagagtttaatttcctaaaatgcagtgtgcccctacattccaatgaagacatggtttgcagtgtttctcctggagccttaattccacctcatggtggggaggatttgacttcacatcctgagactctgacttcggtgagtttctcttttttgtgtgtgatttatctaatagtctactagtttctcatattttaggcatactactttattttcatatctagaatcatatgtttaaaatccatagctttttacaatattttctcaatgttttttcaattatagttttcactatgtatttggttcataagttgctctatctttttgtaaaataatgtcaccagactgaagatattttgtctttgtcttttttttttttttttttttttgagatggagtctcgcactgttgcctaggctggagtgcagtggcgtgatctctgctcactgcaacctccgccttctgggttcaagcgattctcctgcctcagcctcccaagtagctgggattactggtgcccctcaccacagctaaattttttgtatttttagtagacatggggtttcactatgtcgaccaggctgttcagaaactcctgtcctcgtgatcctcccaccttggcctctcaaagtgctgggattacaggcgtgagccacaatattttgtcaagttctgactatcgaacagaagcagtggtcttggcatctaagaaaacaaacaagtaacctatctattcaaatttgcgaagacttagtgaatttacgatatcttatttatatatttttaaagcctaaaaatattcagaagacaggcccagtggctcacacctataatcacagcactttgataggctgaatcggaaagtatcacttgagcccaagaattgagaccagcctgggcaatatagggagaccccccatctctactaaaacaacaacaacaaaaaaaaacattagcagagtgtggtagcattcccctgtggtcccagctacttgggaggctgagctgggtggattgcttggtcctgggaggtcaaggttgcagtgagccctgatcttgccactgcactccagcctgggcgacagagtgcgaccctgtctctaaaataaataaataaatatgcaggcagggccaagtgtgctgtaatcccagcactttgggaggtggaggtggagaatctcttgagcgcaggaatttgagaccagcctgggcaacacagggagactccatcgctacagaacatttaaaaattagcagggtgtggtggcacatgcctgtggtctcagctactctggtggctgtggtgggagaatcgcttgagcccaggaagtctaggctgcagtgagctgtctaggtgacagagtgagaccctgtctcaaaaaaaaaagacatttctaagaaataaatgaaatactattgcctttgcactcagtctctgtctctgattctctgatagaagatttttgaagaaaaaagataaaatctttgaagagttctatacttggaaggcatagtgacataaacacttctgaacatcctgttctctgtgtgaaagaagtgaacttctataccctttgcatttgagggaacaattgctactgggttgatgggcacacacagttgaagatatgtgaaccactggactttggcctctgatacaaactgcctaagagaagagattatttatactggtattaatgctctgatgaaaacaggtcatttgacataaacacttacttgttaaaaacctatatcactacatctaactttgttttctaaaacttttagtacttcaaattctacgtatttcttttctcattacaatgcaaacagtttaatttgcaactgtaatatatgttcattttagtttgtgattacctgcttaatcatttaaataggtccatttaacttgtatccctgtaagataaagtatgttttacacaaaaaggttaattaaggctcagtaaaactattctagaagagtactttaaaaacctcttacacaatcctaagctaaataagtttaatgaattaagtagttacaattataaagcttcagagtgaattatctcatgagtttatttaatataatctttgtatgaatgtatactaaataaaattggcctattcaaatcacaattttaaattataagacttttctgaatttacctagacactaatatgacctaaaataagtattatttaccttttattaaagtgtgtacatttctgttgggaaaacgtgttgcaaatatatatttaaccaaacattatcttgaaatatttacaatattttcactccactttatcacacctcccctaagaaacctacatatagtaaattatttaaagataggagtggagaaaccaaagaatctatgtaaaatataataatccaacagaatagtttactttccattgcatgtatcacttgggtgcagtaacttcttaggactctgagcgccgctgttcacctactaggagagaaaacgcagccagagctcaatccggattctcagggcttcaactacacaagccccacaaaccggctgctgggctgcagggaagctcactccagaatttaaagtgcccaggctacagagacaccctgaagccacagaaagacaaaggaaccggttgaaacacacaacgtgtccagtgaggactttgcagaattctgtaaccagactacaatggccgctcaaaggaatcgctcaaaggaatcaaaggattgcagcgggctggtcctgctctgccttttcttcgggattccatgggaggctggagcccggcagatctcctactcaattcctgaggaattagagaaaggctctttcgtgggcaacatctccaaggacttgggtctggcgccccgggagctggcggagcgcggagtccgcatagtctccagaggtaggacgcagcttttctctctgaacccgcgcagcggcagcttgatcaccgcgggcaggatagaccgggaggagctctgcgctcagagcgcgcggtgcgtggtgagttttaatatccttgtggaagacagggtgaaactttttgggatagaaatagaagtaactgatatcaatgacaatgctccaaaattccaagcagaaaatctagacgtaaaaattaatgaaaatgtcgctgcgggaatgcgttttcctctcccggaagctattgatccggatgtgggcgtgaactccctgcagagctatcagctcagccccaataagcacttctccctaagagttcagagccgtgccaatggcgtcaagtacccggagctggtactggagcactccctagatcgcgaggaagaggccattcaccacctggtcctcaccgcctccgacgggggtgaccctctccgatctggcactgtccttgtcagtgtgactgtcttcgatgcaaatgacaacgcgccggtcttcaccttgccagaataccgagtgagtgttcctgagaatttgcctgtgggcactcagctgctgacagtcacagccaccgacagggacgaaggtgccaatggagaagtgacatattcattccgaaaattacctgacacgcaattgttgaagttccaactaaacaaatatactggagaaataaaaatatcagaaaatctagattatgaagaaaccggtttctatgaaatagaaatacaagcagaagatggaggagcatatcttgcaactgcaaaagtgttgattacagtagaagatgtaaatgacaacagtccagagctgaccatcacgtctctatttagtccagtgactgaagattcacctctgggaacagtcgtagcccttttaaatgtgcatgatttagactctgagcagaatggacaggtaacctgttccattttggcgtatctaccatttaaattagaaaagtccattgacagttattacagattggtgatacacagagcccttgacagggaacaggtatcctcttacaatatcacagtgacagccacagatgggggaagtcctcctctatcaacggaagctcactttatgctacaagtggcagatatcaatgacaacccacctaccttctctcaagtctcctactttacctatatcccagagaacaacgccaggggtgcctccatcttctcagtgacagcgctggacccggacagcaaagagaatgcccagattatttactccctggctgaagacaccatccagggggtacctctgtcctcatacatatccatcaactcagacactggcgtcctgtatgcactcagatccttcgactatgagcagtttcatgagctacagatgcaggtgacagccagcgacagcggggatcctccactcagcagcaacgtgtcgttgagcctgtttgtgctggaccagaacgacaatgcgcccgagatcctgtaccccgccctccccacagacggttccacaggcgtggagctggcgccccgctccgcagagcccggctacctggtgaccaaggtggtggcggtggacagagactccggccagaacgcctggctgtcctaccgtctgctcaaggccagcgagccgggactcttcgcggtgggggagcacacgggcgaggtgcgcacggcgcgagccctgctggacagagacgcgctcaagcaaagcctcgtagtggccgtccaggaccacggccagccccctctctccgccactgtcacgctcaccgtggccgtggccgacagcatcccccaagtcctggcggacctcggcagcttcgagtctccagctaactctgaaacctcagacctcactctgtacctggtggtagcggtggccgcggtctcctgcgtcttcctggccttcgtcatcgtgctgctggcgcacaggctgcggcgctggcacaagtcacgcctgctgcaggcttcaggaggcggcttgacaggtgtgtccggctcgcactttgtgggcgtggacggggttcgggctttcctgcagacctattcccacgaggtctctctcaccgcggactcgcgaaagagtcacctgatcttcccccagcccaattatgcggacacgctcatcagccaggagagctgtgagaaaaacgatcctttgtctttgttagatgattcgaagtttcctatagaggataccccattggttccagtgagttttattttcatttttacttttgttaaaaaaaaaaagattggtttttactttgaagtttgcggcatgatggtggaaagtgtaaatgctaaaacactgatgagtagaatttgatgtttattaaggttttttttttttttttttttttttttttttttactttctggtaaaattcacctagtctcaatcaaggcctatatatcataaggctttgttatgattagctttgcagaaccttgtagtttatagtgttgttgagtacaatattgacaattcctaagacagacttccatacagaagtgcctgtcaatttatatttcctcctgggtggtcacatattgaaactccagccccttaagcaaccctcttgttctgaaggcaggtctggtaagaataggtaagtatcagaaagaaatcacctctggaaacacaacccaaatccaagaatactcaatgcagttcttcccaaggagaagggcaataggcctttttcaaactacattttatatatttttcaatctatactttgtggtgatagttgcagttgaatatactaagtttttcattaatattgaattaacaatttatttataacaatgtatgcttagatttttccagccctatttataactgataacactgcagtatcctttttgcatacaattctctaatttcacactgctatgtggaagatatagcattttaatttaactttcattgctcaatagggatcctgaggaggctatagagggtgaaattaagaatatttgggattctgcttttgtcttttttgttaaattttctagtgactaaggctgaaagtaaatatgggttgggaagacagataaatttgtacatgttcccgagaacaggagcaagagatatatgacaaagctatttcagtggctctttaatgtataaggaggcaaacacctgaaactctgaaaactctgaaattgagaggcaaaataaacttagagtcaagaaagaaatgccatttctgcagatcagaatataaacaccaaccacagctgtaaaaaagaaaagaatatatgcaacgaagggaaattatataaacaaaggatcattggaggtactgatgagttcatttagttcaatgaaaatagtgacgtattaggtagatctcttaattttattactagtattctactaaatgtggtagtataaagtcaaaaagcattccgaagtttctcaagacccttataattccatgatttttttcaggtcagtcaacatttgttgaatgataggtctgtggaaggaaagcacactctttagggtcatagttattaactattaaaccattgaaactattattttatatttgtgttaatgagagtcaaaattattgtgcattcatctcaaataattctattattttgaaaaatacaggttttttttttaaaaaaaactgctcttgacattgtagctattgtgagaaaatattttgattataattatttaaaagcaatacaggacaccctggatgatggtaatgactagggcaatggttgcattccagtacttaagtatgaaataaggaattattactttctgggtgaatataggctagaattgaagacaaaaaaatttgttgcttatcttcagtacttccagcttcatagataattactcttaaaaggaacaagaatgactgcctctggatggaggaattggatagcaatgggccgtgggataggagacctataaaccttcatgctatattattttgtgcctttttaaattttgaagaaaaaatattcatttattcaagatatatgtaaattcagtaaataaaaagatatgatagttatgaccaagtggaaatatatttcctgatgtaaaaggaatcactgaggaaaaagattaaaatattttggctgtcaactcgtagtttaaaaaaaattccttgaaagaggtagagaaaagtcaagttgcagtcccacacagagcctctgggcgccgccgtcggccagtgcagagcaagcgctgacgccggggatccctcagcctctagcctgggattccctgcgcagccaacaacagaaaagaaaaccagctcccacacagaggctcccggctgcgcagaccttgcccagcacaccagattgccagctccgagacccgggactcctcctgtcctgggccgaatgctcttttagcgcggtagagtgcactttctccaactggaaaagcggggacccagcgagaacccgagcgaacgatgggagggagctgcgcgcagaggcgccgggccggcccgcggcaggtactatttcctttgctgctgcctttgttctaccccacgctgtgtgagccgatccgctactcgattccggaggagctggccaagggctcggtggtggggaacctcgctaaggatctagggcttagtgtcctggatgtgtcggctcgcgagctgcgagtgagcgcggagaagctgcacttcagcgtagacgcgcagagcggggacttacttgtgaaggaccgaatagaccgtgagcaaatatgcaaagagagaagaagatgtgagttgcaattggaagctgtggtggaaaatcctttaaatatttttcatgtcattgtggtgattgaggatgttaatgaccacgcccctcaattccggaaagatgaaataaacttagaaatcagtgaatccgtcagcctggggatgggaacaattcttgagtctgcagaagatcctgatattagtatgaattcgctgagcaaataccaactaagtcctaacgagtatttctcattggtggagaaagacaatcctgatggtggcaaatatccagaattagtattgcagaagactctggaccgagaaacgcagagcgctcaccacttggtactgaccgccttagatggtggggaccctccccgaagcggtactgctcagataagaatcctggtaatagatgccaatgacaaccccccagtgttcagccaggacgtgtacagggttagccttcgggaagacgtgcctccaggcacctccatcctgagagtgaaggccactgaccaggacgagggcatcaactcagagatcacttattccttctttggtgtggctgacaaagctcagcacgtgttctctctggattacactacaggaaacattctaactcagcagcctttggattttgaagaagtagaaagatatacgataaacatagaagcaaaagaccgaggatctctctcaacacggtgtaaagtaattgtagaagttgtagacgaaaacgacaacagcccagaaataatcatcacgtcactctctgatcagattatggaggattcccctccaggagtggttgttgccctcttcaaaacacgggaccaagactcaggggaaaatggggaagtcaggtgtagcttaagtagaggtgttccatttaagattcattcttcttctaataattactacaagctagtaacagatgaggccctggatcgggagcagaccccagagtacaacgtcaccatcgcagccacagacaggggcaagcctccgttatcctccagcaaaaccataaccctgcacattactgacgtcaatgacaacgcgccggttttcggacagtcagcctacctggtccacgtgccagaaaacaaccagccgggtgcctccatagcgcaagtcagtgcctctgacccagacttcgggctcaacggccgtgtctcctactctctcattgccagcgacctggagtcacgaacgctgtcgtcctacgtgtccgtgagcgcgcagagcggggtggtgttcgcgcagcgcgccttcgaccacgagcagctgcgcaccttcgagctcacgctgcaggcccgcgaccagggctcgcccgcgctcagcgccaatgtgagcctgcgcgtgttggtgggcgaccgtaacgacaacgcaccgcgggtgctgtaccctgcgctgggtcccgacggctccgcgctcttcgacacagtgccgcgggccgcgcagccaggctacctggtgaccaaggtggtggccgtggacgcggactcggggcacaatgcctggctgtcctaccacgtggtgcaggccagtgagcccgggctcttcagcctggggctgcgaacaggcgaggtgcgcatggtgcgtgctttgggtgacaaggactcggtccgccagcgcctgctagtcgctgtaagagatggaggacagccacccctttcagccactgccacgctgcacctggtgttcgcagatagcttgcaagaggtactgccggatttcagcgaccatcccacaccctctgactcccaggctgagatgcagttttacctggtggtggccttggccttgatttctgtgctctttctcctcgcggtgattctagctattgctctacgcctgcgacagtctttcagccctactgcaggagactgctttgagtcagttctctgctccaagtccggacctgtgggtccccccaactacagtgagggaacgttgccctatgcctataatttttgtgtgcctggggatcaaatgaatccagaatttaattttttcacatctgttgatcattgtccagccacacaagataacctcaacaaagatagcatgctactggctagcattttaactcccagcgttgaagcagataagaagattcttaaacaggtaagtatttaaaaatgtatttaatcctttttatattacaatatgccaatatattccaatatagtggtattattttaagattctagataacttcttcatagagttcgcaaaatataggtcaaatttatggttatcattattaaaacaaaagtttaaattaaatgcctcagtcttcctactattcaaagacattttaaagcaaactacatgggtaatctccggtgacatttttatgaagtaaaatacctttcggttaaaaatataaaatacaggtatatttttacggcatggtattttaattgaaaccctgatgctactcaatttttctcaagtatttcatcttcatttactcaataaaggaaccttgtaagaattatagttaggcatcctacctgatgattttatcgggaccgtattatttccacttccagaaatgtcgttcctttcagtcggttaaaatcaattggaaccaactacaacctacaagttttcagctccagtaatattttgaaaactttttaaaaattaagcaagcccttttaataattactcctttcgcaggtgttcttggtaaagttttaacgtcacataatgtaagtattgtgtatcatcgtttttaagctctacaaatacgtgtgattcacaaaggtgagcgtaatcatttcttctggaatttcttagtcgttgcaataataagaatgggctctaggcgccgctgctcaccaatcagggaatgggaagctgcgcgccattgagtccctccctcccccgcctctaccacacaaagcggaatgagatggatactcacagatcctgacactggagacttagaagtattttccttcgctttctgatatattttggatgtagtcggcctaggacttcatagatacataagccgattcacaaccaaccagctcgagaaaccgcggaatatcggcttagagcctgccatggcgaatcggctacagcgcggggaccgcagtcggctgctgctgctgctgtgcattttcctggggacgctgcgggggttccgggccaggcagatccgatattcggtgccagaagagaccgaaaagggctccttcgtgggcaatatctccaaggacctggggctggagccccgggagctggcgaagcgcggagtccgcatcgtctccagagggaagacacagcttttcgctgtgaatccgcgaagcggcagcttgatcacggcaggcaggatagaccgggaggagctctgtgagacggtgtcctcctgttttttaaatatggaacttctcgtggaagacaccttgaagatttacggagtggaggtggaaataatagatattaatgataacgcccccagcttccaggaggacgaagtggagataaaagtcagtgagcacgcaattcctggggcgcgatttgctcttcctaatgctagggatccagatgtgggcgtgaactccctccagagctaccagctcagccctaataattacttttccttgcaactgcggggcagaacggatggggccaagaatccagagctagtactggagggaagcctggaccgagagaaagaggctgctcacctgctcctcctcacagctttagatggaggcgatcccatccgaaagggcgcagttcccattcgtgtggtggtcctcgatgtaaatgatcacatcccaatgtttacacagtccgtatatcgcgtgagtgttccagaaaacatcagctccggaactcgggtgctgatggttaatgcaacggatccagacgagggaatcaacggggaagtaatgtattcatttcggaacatggaaagcaaggcttctgaaatattccaattggattcacaaactggagaagttcaagtacgggggtctctggattttgaaaaatatagattctatgagatggaaattcaaggccaagatggtggaggtctctttaccaccacgacgatgttgatcactgttgtggatgtgaatgataacgctccagaaataactatcacctcttctattaattcaattctggaaaactctcctccaggtacagtgattgctcttctaaatgtgcaagatcaagattctggagaaaatggtcaagtctcctgttttattcctaaccacctgccttttaaattagaaaagacttatggaaattattacaaattgataacaagcagagtgctggacagggagttggtccagagctacaatataacgttgacagccacagaccagggaagcccgcctttgtctgcagaaactcatgtctggctgaatgtggcagatgacaacgataaccctcccgtttttcctcactcctcttactctgcctacattcccgaaaacaaccccaggggtgcctccatcttctcagtgaccgccctcgacccggacagcaaacagaatgccctggtcacttactctctgacggatgacactgtccagggggtgcctctgtcctcctatgtctctattaactccaacactggtgttctctatgccctacaatccttcgactatgagcagtttcgagacttagaactgagagtgatagcacgtgacagcggggacccgcccctcagcagcaacgtgtcgctgagcctgttcgtgctggaccagaacgacaatgcgcccgagatcctgtaccctgccctccccacagacggctccactggcgtggagctggcgccccgctctgcggaacctggctacctggtgaccaaggtggttgcggtggacaaagattcaggccagaacgcctggctgtcctatcgcctgcttaaggccagcgagccgggactcttcgcggtgggggagcacacgggcgaggtgcgtacagcgcgggcactgctggacagagacgcgctcaagcagagcctcgtggtggccgtccaggaccacggccagccccctctctcggccaccgtcacgctcaccgtggctgtggccgacagcatccccgaagtcctggcggacctcggcagcctcgagtctctggctaactctgaaacctcagacctctcgctgtacttggtggtggcggtggccgcagtctcctgcatcttcctggtctttgtcatcgtgctgctggcactcaggctgtggcgctggcataagtcacgcctgctgcaggcttctgaaggcgggttggcaggtatgcccacgtcacattttgtaggcgtggacggggtacaggctttcctgcaaacctattcccacgaggtctctctcattgcggactcgcagaagagtcacctgattttcccccagcccaactatggggacacgctcatcagccaggagagctgtgagaaaagcgagccactcttgatagctgaagactcagctatcattttaggcaaatgtgacccgacaagtaatcaggtgagatttatttctctgcctcctaattgttggtgtcttggcacaagtcttttaaggagatgttttttgagcctgttatgaaaactgtttggggggggggtggggcggcatatatttagttcatatatatttagagcaatacatgtgagttttactttgcctttcatgagattacgataatctttcagaacgtttttgtgaaagtcatttttcaatcttggcatattttcttttgatttcaaaggggccattcaactatgctggtttggtttgaagtaagttgaattttagtattatttttctattatcagtgtatgaggctctcaatttattatatatagatacaaattaatgattcacaaacactttttatttccatttcaattttgctgtgccttcactgatttgtagttatattccaccattatttgctattactgctaatgttcaaattttgatcctgttgatttaatagcatgctccctctagctctccttctcatctatctatctatacacatgcacacacacttatacacgtaagcttttctctgagcaattttattttgattcttggtggctggtaatatgcttagatcctgttgactatttcaactttgtctcatttcttcatcctatcaacacagacatattgactggcttttaactactggatttccttgggagataaaatttagatcacattttttcttaagctctagatgtcttttccattactatggtgaagttacattgactgttctgaggaaataattgaattattgaactggtattatttccttttattcttttactttggtgtctgtgtttgtatgtatggaaggttttttaatgtagtaaatccatatatagaaataacttgattttgattcagtgcttctcaaaaacctattttcaaatgtgctaaagatgtctacagatttattcaaatagagtagtttgtgaatatataaatagattgaaggtatttggactttaattaaactgatttagctagtatccttctggctatttttttgttcattttcagtgtagttgggagtcatagattccttctttctttctttataaggtcattcttatggcaaatagtacattcagttcttttattcagaccaacttgttattgaagcttgatagttgcctgacatacatgttatctgaagcaatgtctaggaaagccaaatgaggaaaggagacttatctagggtttttgatcacaggaatcatttccataatcaattcagtcaacactctcacatcacttctaggtatttgccccaaattacttggatatttatgttccctttcaagtttagttttctcatttaggaatttaccttatgtcattagttgtaaactgactatctagggctcggacaaaaataatttcaactgtaggaaaggcaagtcttccaacagatgcctacatttttcttgaagtcaagaaaaatgttcaggtattttgagcatctagggataggatttatacttgtggaattccaaactgagaaaaatgatgtaaggcattgtactttgactggaattagttaaataaaaaggatatgaggtatttggctgggaaaaggagattgttccatattataaaacctcatctaaactaacttcccaagatcgtggagaacaaaaaggaagggttggctttgaaatgtgatattaagagggttatgttgattcggaggtagtgataaagttctgttaaggtataacatatagtcccattaaatagaggataaaaataaaacaccatcacatttcatgttattaattcctatggcaacctactaggctatacctttatattctctttatgatgaaacatgaaacaataatccttttcagaaacctcttttataagtgataagaagggtttggctaactttattctgaatatgccctatatagctttcagtgctcctccagttttctctgataaaactaggaggaaaattatctgcacatcagattgaaaataatactgcatatcatttcatagtggtcaaaattttcccataccacttgatggggatgttttcccacaaggtttttgttctacaacaggagagaagactttgcctagttcttccaatatgtgcattgcttctgcttagaaaaaaacaaacttttaaattctctttgctgggttaatgactgttctatagattcccatctctaaggaatcttctttggtagtaaacactggaaaacagtcactacgaaaactcataaaatgtctagtttcctatacattagtccaacacatcagtctaattctgaatcccattgaattagcaaaggcttccggctgcagttttctaaatagactcagagccctgctgttggccaatgtgctgcaagaactggagcctgggatctaccaggacgatattctgttcagtcacagaagcaagtcggagagtggccaagacttgggctttctgctcctgcaaatctgattccatacggattggggtgccctcaaactgggagcattgagttttctatgtatggaagtaaatattttaaaagcactttgtgaaacattttctcttaacgtcggagactgcagcaacgcatgggaaggatgggaaacagggtgaagcagagaagcaggacccggcagtggcaagcactcttccctttcctgctgcctttgttctgcggggcaccctcggagcagatccgctactctattccagaagaaacggtccagggctccgtggtggggaaccttgcggaggacatgcggctgcatgttcaggatttattgacctgaaaccttagagttagtgcagagaaacaatactttaccgtgaacacggagaatgggaacatacttgtgagtgacagaatagatcgagagtcactgtcttcaaaatcctctgtgtcatacccttagagattgtagcagagaatcctctaaatgtttttcacataaatgtgatgatagaagatataaatgataacccacctcattttccccaaaatagcattgttttacaaatcaatgaactagcaattccaggcattcggtttggcctggaatctgctatagatgcagatgtagggcctcactctctccagagttaccagctcagttctaatgaacatttctctctgatgatggacaagactaaaggcaagaacgctccagaattagtgctggagaagcccctgggccaggagcaacagagctctcatctcctggtcctggaagcaatggacatgggtgacccagtcccaactggcactgctgcaattcaaattgaggtcactgatgccaacgataatgccccagtttttagccaggatgtatacaaagtcagccttagagagaatgtgcccccaggcacctctgtactaaaggtgacagccactgaccaggatgagggtgtcaatgcggagatcacctactctttcaaatccctacgagatgatattggaaatatgtttgtgctagaccatcaaaatggggaaattaaatccaaagacttaatagacttcgaatttcgtagcagttataccatgagagtagaagctaaggatggtggaggcatgaccagcgaatgtaaaattatactagaaatcctagatgagaatgacaatgccccagacgtggtttttacttcagtgtccagttctgtaactgaggacgcagaaccctggacggtgatcactctgttcaaaacacatgataaagattcgagagaaaatggggaggttacatgcctcataaacgaaagagttccttttagaatcgaatcttccgccaataatgactataagcttgtaacagatgggaccctggattgggagcggatcccggagtacaacgtcaccatcactgccactgacaagggcaagcctccgctctcatccagcacaagcctcaccctacgcattggtgaagtcaacgacaatgctccggttttccaccaagtctcctacgtggtccacgtggccgaaaacaaccttcccggagcctccatcccacaagtcagcgcctctgacctggacctagggctgaatggccaagtctcctactccatcgttaccactgacttggagctgcgggcactgtcgtcctacgtgtccgtgagcgcacagagcggggtggtggtcgcgcagcgtgccttcgaccacgagcagctgtgcgccttcgagctcacgatgcaggcccacgaccagggctcgcccgcgctcagcgccaacatgagccggcgcatgttggtgggcgacctcaatgacaatgtgccgcgggtgctgtaccccgcgctggggcccgatggctccgcactcttcgatatagtgccacgcgccgcagagtccggctacctggtgaccaaggtggtggcggtggacgcagattcgggacacaacgcttggctgtcctaccacgtgctgcaggccatcgagcccgggcttttcagcctggggctgcacacgggaacctgctggttgctgtgcgtgacggaggacagccgccgctctctgcgccgctacgcttcacctagtcttcgcagacagcctgcaggaggcactgccagacttcagtgacagtcctgtgccctctgattcccaagcaaagctgcagatttacctggtcgtggccttggccttgatttctatgctcttcttcctcgcagtgattttggcggtcgccttgcacctgcgatgctcttccagcccctctgcctggggttgctttcaccctggtctctgttctaagactagaccaggggtttttcccaactacaatgagggaactttgctttattcctgcaatctgtatgttccctcggattctagaaaaagaagatttaattttctcaccatgacaccagaaacagtccccccacaagatctttctaatgaagtttctctggtagcaagcttcactgaagagaataacaagataagctctaactctgttgctcctactcacgtgagttccaatgaatgtctttcatttacaaatggatgaggtttaattttcaaaccaatattttggcaagaaaatcttaaacatattatatctactattgcttcaggtttgtttgcccactcttaatatttcctgttcctttctgtgtgggccagtaacttcattattagctttcatgtatttttgaaacattttcaccatttttacgggagactttttttttttttggacggagtctcgctctgtggtccaggctggagtgcagtggcatgatctcggctcactgcaagctctgccttccgggttctggccattctcccgcctcagcctcccgggtagctgggactacaggcgcccgccaccacgcccggctaattttttgcatttttagtacagacggggtttcaccgtgttagccaggatggtctcgatttcctgacctcgtgatctgcccgcctcggcctcccaaagtgctgggattataggcgtgagccactgcacccggcccggagacattgtttatacacacacacacacacacacacacacacacacacacgtgtgaaaagtgggtattatgatactgctgtcattgagatattttaattgaggaataaatttttttcctgtgatgtttcttgggacatcaatatttgagtatataaggctttttctttaatccattaactataaattttgaagaaaatgcatgagaaaatggagaaaatgtgttttttttttaaaaaaaattgagattaaggtctcattatgttgcccaggctggactcaaactcttgggctacagtaatcctcccacctcaatctccagagtagctgagactacagttgcctgaaactgtgcctggcagagaaaaaagcttaaaaaaataagaacatggtaatgatttgataatattcagttacatttacttttgattcttgtaattcaagtaaactcaattttatgtctgatattttctcacagctacctatatatttcttcccaatttaaaatatattattttattttatgcctagcaaatatctttacagtataaatatttacgctcatgaaagtacgtagccagttatttcttagggagaattttttccctatattttgatgggcttccaaaagtattaccagtaattctcagtaattacaattaggtcagttacccaggaaaaggtaagtctgtaacattctttggactaccaattttcttttactaagtttcctgaacaataaatatttttgaaatataatgtattaatagaattctggagtacttccattatttccagtcaatgcaagttggaatgcttctactttatgctaaaaatattaatgtttctttttcacttgggttcttgttaagtgtgattctgataatgtatacaatcacatatcatttttaggtttccataatatcatgaaaatttgatttttaagcgttacatgtcaacaacctggtaaagtaatccttccattcaggatcattcaaggaatctatttaaaaatattttccccaaattatagctgaatcagaaagtttaaattattatattatatgatttgtcaaaaagagaaactcctagggagacatctccataataggtgtgttgggggaacagtaatctcaaagcagatgcactaacattataagattaaaatcattgtttatagaaacttccaattcatttaaaagctcattggggaaaaaaaagctcattgggaaaaaaaaaaaaagctcactaaagtttctattaaagcgaatacggtagatttccatccccttttgaagaacagtaggtggagctatttaagatataaaaacgaaatatcctttctgggagttcaagattgtgcagtaattggttaggactctgagcgccgctgttcaccaatcggggagagaaaagcggagatcctgctcgccttgcacgcgcctgaagcacaaagcagatagctaggaatgaaccatccctgggagtatgtggaaacaacggaggagctctgacttcccaactgtcccattctatgggcgaaggaactgctcctgacttcagtggttaagggcagaattgaaaataattctggaggaagataagaatgattcctgcgcgactgcaccgggactacaaagggcttgtcctgctgggaatcctcctggggactctgtgggagaccggatgcacccagatacgctattcagttccggaagagctggagaaaggctctagggtgggcgacatctccagggacctggggctggagccccgggagctcgcggagcgcggagtccgcatcatccccagaggtaggacgcagcttttcgccctgaatccgcgcagcggcagcttggtcacggcgggcaggatagaccgggaggagctctgtatgggggccatcaagtgtcaattaaatctagacattctgatggaggataaagtgaaaatatatggagtagaagtagaagtaagggacattaacgacaatgcgccttactttcgtgaaagtgaattagaaataaaaattagtgaaaatgcagccactgagatgcggttccctctaccccacgcctgggatccggatatcgggaagaactctctgcagagctacgagctcagcccgaacactcacttctccctcatcgtgcaaaatggagccgacggtagtaagtaccccgaattggtgctgaaacgcgccctggaccgcgaagaaaaggctgctcaccacctggtccttacggcctccgacgggggcgacccggtgcgcacaggcaccgcgcgcatccgcgtgatggttctggatgcgaacgacaacgcaccagcgtttgctcagcccgagtaccgcgcgagcgttccggagaatctggccttgggcacgcagctgcttgtagtcaacgctaccgaccctgacgaaggagtcaatgcggaagtgaggtattccttccggtatgtggacgacaaggcggcccaagttttcaaactagattgtaattcagggacaatatcaacaataggggagttggaccacgaggagtcaggattctaccagatggaagtgcaagcaatggataatgcaggatattctgcgcgagccaaagtcctgatcactgttctggacgtgaacgacaatgccccagaagtggtcctcacctctctcgccagctcggttcccgaaaactctcccagagggacattaattgcccttttaaatgtaaatgaccaagattctgaggaaaacggacaggtgatctgtttcatccaaggaaatctgccctttaaattagaaaaatcttacggaaattactatagtttagtcacagacatagtcttggatagggaacaggttcctagctacaacatcacagtgaccgccactgaccggggaaccccgcccctatccacggaaactcatatctcgctgaacgtggcagacaccaacgacaacccgccggtcttccctcaggcctcctattccgcttatatcccagagaacaatcccagaggagtttccctcgtctctgtgaccgcccacgaccccgactgtgaagagaacgcccagatcacttattccctggctgagaacaccatccaaggggcaagcctatcgtcctacgtgtccatcaactccgacactggggtactgtatgcgctgagctccttcgactacgagcagttccgagacttgcaagtgaaagtgatggcgcgggacaacgggcacccgcccctcagcagcaacgtgtcgttgagcctgttcgtgctggaccagaacgacaatgcgcccgagatcctgtaccccgccctccccacggacggttccactggcgtggagctggctccccgctccgcagagcccggctacctggtgaccaaggtggtggcggtggacagagactccggccagaacgcctggctgtcctaccgtctgctcaaggccagcgagccgggactcttctcggtgggtctgcacacgggcgaggtgcgcacggcgcgagccctgctggacagagacgcgctcaagcagagcctcgtagtggccgtccaggaccacggccagccccctctctccgccactgtcacgctcaccgtggccgtggccgacagcatcccccaagtcctggcggacctcggcagcctcgagtctccagctaactctgaaacctcagacctcactctgtacctggtggtagcggtggccgcggtctcctgcgtcttcctggccttcgtcatcttgctgctggcgctcaggctgcggcgctggcacaagtcacgcctgctgcaggcttcaggaggcggcttgacaggagcgccggcgtcgcactttgtgggcgtggacggggtgcaggctttcctgcagacctattcccacgaggtttccctcaccacggactcgcggaagagtcacctgatcttcccccagcccaactatgcagacatgctcgtcagccaggagagctttgaaaaaagcgagccccttttgctgtcaggtgattcggtattttctaaagacagtcatgggttaattgaggtgagtttatatcaaatcttctttcttttttttttttaattgctctgtctcccaagctggaatgcagcggtacgatcatagctcactgcagcctcaaactcctaggctcaagcaattatcccacctttgcctccggtgtaacagggactacaggtgcaagccacctactgtctgcctatctatctatctatctatctatctatctatctatctatctatctattactttcttgtacagacaggagtctcactatgttgagcaggctgatctgaaacttgggctcaggctagcctcctgcttctccctcccaaactgctgggattacaggcgtgaaccacagtgccccgcccttatcagatattcttttctggctgggcgcggtggctcacgcctgtaatcccagtactttgggaggccgaggcgggtggatcacctgaggttgggagtttgagaccagcctgaccaacatggagaaaccccgtctatactaaaaaaatacaaaattagccgggcgtggtggtgcatgtctgtaatcccagctacttgggaggctgagtcaggagaattgctttaacctgggaggtggaggttgcaatgagctgagattgtgccattgcactccagcctgggcaacaagagtgaaactctatctcaaaaaaaaaaaaaaaaaactttatcctctagtttcatccattgatgacacttgctttaatcacttattacaatcacctccaaatgaagattttataattccattgtttcttctacagttgttaattggctttctaccttgaagaagagttttatattctctatatatgtttgtttctatgattctggaagcatggttttctattttattcaatggcctgtaatctgttaatatcaattatttattttgatgctgaaattgtcccaggattggcctttgggactccctttaggctgatttctatgtcctttctgttacagcaagcttgggattatatccaagatttgtaattccaatgtacttacttctgtcagtgtaaacaaagtacgatttctggactagatgacttgggcattgtgggggaggtggaaattagaggtattctctgtttttcctgtaggatcttgcatttcttcctcttgctgcttgtctctttgtgtcgggaacaggccccccaaaatctggccataaactggccccaaaactggccataaacaaaatctctgcagcactgtgacatgttcatgatggccgtaatgcccatgctggaaggtagtgggtttaccggaatgagggcaaggaacacctggcccgcccagggcagaaaactgcttaaaggtgttcttaaaccacaaacaatagcatgagtgatctgtgccttaaggacatgcccctgctgcagataactacctcaatccatccctttatttccgcccatctcttcgtttcccataagggatacttttagttaatctaatatctatagaaatgatgctaatgactggcttgctgttaataaatatgtgggtaaatctctgttcagggctctcagctctgaaggctatgagacccctgattccccacttcacacttctaaaaaaaaaaaaatttttttttctgagcttggagaaatatatcccttagtacacttggcatttataaagcagacatcaataaatttatatatatgtgacagataccaacaacaatccagtccccttccctcataccttatttatgtacatatattttatataatagatataatttattaacaatttataaaattactttgttaatactctatatcattttctagctgaatttatcaatgataatgctcttttcccacttttatttttttcccattgaccatgcagcagttttgtgtagaccgtctgataacaactgatctgtttatctaggggggagaaatctaattcaatggaaaatataaataaaattgtgataaacttttgtaaatagagtggcttttaactacacttgagatggctagcaaattcataaagtgaatttactttctttcaaagttcagtaattctttctggccattagggatatgtccatttatactttctcagtatcccaagtcatttcatggttttaaatcattcatgaacttccaaatatagtgaatttatttcttctgcatttaaaattttatcacttaaatatacaatataccgtattgccatgacgaaaaatggtaaagactatttttcacttctgttatgcatttcattaatacgatatctgtatgtgtttccaagttagacatttcttttgcccatttcctacactaatgatactaatgatgactttgtggaatattcagaattaacaaaatgtgttttgagtgctttttttagtactggggcaaatttgcagtaatatcgcctgctttttacattaaattccccataacttttacaactatgggaaaatttctgaaacgtgcacagattccaagtgttttctgagaactttatgcttattgtagagtggttacagacactgaatgctaaagtgtattactctttgaaaagcattgcttgatttcttttggtgaattctgtaaaggtgcagggaaacataacgtcccaattattttttctttcttctttgtttgctgcctatctactttgaaagatacaatagttaaaacccagaaaagagattggaaaccccttagagaatgaaagacatccaagggctctaaaatgcggcagttgctgcttctgagaccaaaaaagggggcaaaatatagagtgtgtggttctacttgtgtgattttttgaaagaaagtatttgaatttatctaaaaatactaaatttgtatttacattagttttcaaatagaatttaataagtacagtgttctataggtaatattgagagaaatagaggacaatgaaacctctctcctccatcatcttgtatgaactaccaaaatgtttatcatatggacagttctcatatatagtcaaatagaaagaaagacataataggaaaacaaatgacttgggaaactaagctaacatggtctaattattctgacctctgctcacctaacttgatttaggaacaaatcattgagagttagagcatgaatagtcaagactgttagaccatatctcaaatatcagtgacttcaatcaactatgtttccagtttaagctgaataggctttattaaatagttgttgaatgaatggataaacaaataatgtactctggggattacctgataccaggattctgaattttcagatgtatcatagaaggatagcagctttgcaattaggtaaattgttaactgtgtcacctttagcaagttatttaatctctttgagcttcagcaaagtaggaataatcatatctaatttgaaaggtcgtggtgatggctagggctaacaaaaatctgattcacaacatgcaattaattaacagtagccatttttagtggttgaccaaaaaaaggatttatattttcaatgccagcacactcgatgttctgttgggaaaaataataatgatttttgtgtgcttctccatatggtataatggaatgatttgtggatggaaataaaactgttctaaaatttttgtgacagctggtttaaaaatcttaagtgcctaggcacattcttgattgagaagccacagttttaggccataaaagatgggggaaagatttttatatgagacaattttgtgagtgttactttttctttgtctgaaccatagtgaaatctaaacaaggatcttgtgaaacttattttaaagaagcagtttacttcaatgggatcttagataatttcaccagaaaatggatcaccgaaaccagaaggctggtgatcattatttggtttgggccatataagaattgaaactaacggcttagctttaggatttttaggacacttgttgataatttaggattcataattaacatatgtgttgattgttttctgagactaactgggcaatgggtttggatgtgtttacatttattctgattccagtcataaaattatgtcaaggactttccttgtctttttatgtgtatgacagatgtgtatgtatccatttcatctaacaagttaaagcgttcagctataatttaaaatttgtagcttcactgttttatagtacctaaaattggaatgtaatcagtcagaagacattcatccactgctttcattccagaagtattatgctttttgaagcagcaatagcataggaatgttgaggagactatactatacttttatagcatatttaatctcgtagatcacttttcaatgaattataaggctgatgacaaatgagcaaattgtatcagttttctttatgacatgtaacagagtatagctgtgatcatgaattggatagttctggtgtaaaaatctgctttatccccatataagatgtcaggttcagaaaagcaaacacatagtttcgaagagatgttgatcaaactgatgaggctaaatctcaagaaagagacacagttaccctctaatgttacactttgagttcacctttttttttttttttgagacagagtctcaatctgtcgccaagctggagtgcagtggcactatcttggctcactgcaacctctgcctcctgggttcatgctattctcctgccttagcctcccgagtagctgggactacaggcacacgccaccacacccagctaatttttgtatttttagtagagatggggtttcaccatattggccagaatggtcttgatctcttgatcttgggatgcacccaccccacctcagcctcccaaatagctgagattacaggtgtgagccaccatgcccgaccactttgagttcacttttaagaaaccatacttaatggaaaattaccagtaacagggcatactgtttaggatgcattcctaaaatattaatggcaaaagatagccagcctatggcaaagctaattggaaaaaatattttataaaggatgagacttctggataccatatgggaagggctctggttcaggaaaatgtttttaaaaaactgtcattgaagagaccatagaatcaaacaaaataatttaatctgtatgtaaaagaagttggtaccaccataatttttcttatacatgtcatataaggatctactctgtgtattgtcattgagggcagatataatttcttagttcatcattaactctctgaagtatttcacacagtagtttgtacaccttctaagtactcaatacaatgcttgagttcaattattggaaagtggtctcttggagaaaaaagaatcatagtgcaaaaccaattattttacatggacttttcctctatatctaagccctaataagaggcagctgtctgatatacatacatacatacatacatatatatatatatatatatatatatatatatatatatatatatacacacacacacacacatatatgtatatatatatttggagtaggggatggagtcttgctctgtcacccaggctggagtgcaagtggtgtgatctcagctcactgcaacctctgcctcctgggttcaagcgattctcctgcctcagcctctccagtagctgggattacaggcgcctgtcaccatgcccagctaattttttaaaatatttttagtagagacagagtttcatcaagttggccaggctgctcttgaactcctgacctcaggtgatccacctgccttggcctcccaaagtgctgggattataggcatgagccaccgcaccctgccaactgtctgacttatcttaaaaggctaaggacctggtttgtttgtcaaattttgaaaatagatgcctcagttcataagatttccatattgtgtggcaggcgcctgtaatcccagctactcaggaggctgaggcaagagaatcacttgaacccgggagacagaggttgcagtgagctgagatcacgccactgcactccagcctgggcgacatagtgagactctgacaaaaaaaaaaaaaaatccatatgtgaaaattcttagaagcttcctatacaatttcagctgaagattcagccaacagttcattctgagactgtgttccatggaaaaagtaaagcccaggcatggaagtgggaatggaaagaaagattctaagcctacaaatactcaaacatcaagaagaaataaaaataagtcatcacttcgacttcatgtgctaacatcactgaggttataaattcccaggaatattttattgcgggagcaagactgcactgctgcctttcagcttgcaaattccagtgagaaacgtctttctctctgctctcaactaactctacagaacgctgtcctctcatttcttcaggctgcagttctagagtagggactcagagtgccactgttggccagtctggaaacagagataaatgagccaatccccagacattccggcttggtggcttttctaatttcatggaatgcaaatccaagagcagacccacaacattcctattatggctcctagttctacaaattataagcaggaacggaacggatttacaggcaatgagttcagctccttcttggctggagattctataatccaagaagagtttgaaaaggggcttatttgggctggagcagcagcaactctaactgtggaaaaggtggggaatggtgctggactgacagtctgggtagaaccaaggcgactactgcctcctttcctgctatttctatcctgctgggcattctctatgatgcagatccgttattcagtcctagaggagctggccaagagtttggtggtgggaaaccttgccaaggatctgggactcagtgtcgaggacatgcccacttgaaagcttcgggttaatgctgaggaataatacttcattctaagtggggaaagtggagacttacttgtgaatgactgaatggatcaggagcagatacgccccccaattatagcttgggccataacgctttgaaatagttgaaggccaggcatggtggctcacacctgtaatcccagcactttgggaggccgaggcgagcagattacgaggtcaggagttcgagaccagcctgaccaacatagtgaaaccctgtctctactaaaaatacaaaaattactgggcatggtggtgcaggcctataatcctagctactcggggggccgaggcaggagaatcgcttgaacccgagaggcaatcgcaccactgcactccagcctgggtgacagagcaaggcgccatctcaaaaaaaatgaacaaacggtagttgaaaattctttaaatgtttttcacattaatatggagattcaggatatgaagaatcatgcaccacggttcagcaggaatgttattaagttacgtatctctgagtttacccagctggaacaagatttgcaacagaacctgcagaagatcctgatgttgagagaaattccttacaaaattatcaccttagcagcaactctatatttctctttgaagtaaaagtgaccaacagtggaaagacatatgttgatcctgtgttagagaagctgcttgactaggaaaagcagagctcccatcccttagtgctagcagccttagacggccccccaacaaagcagcatcactcaactcctgatcctattggttgaagccaatgacaaccctgtgttcatctaggatgtgtacagcgtcggccttcaggaagatgtgcatccgggcactcctgtgctgagagtgagggccaccaaccaggactagagtgtcaaggcagagatcacatatggcttcacaacccagagtacccatatctagtttggccttgatcaaatagtggagaaatgaaaactttaagtacattggacttttaaagatttttaatttccatggttttggtagcaagtgacagagagggactcattgtccagtgtacagttgagaccgaatttctagaagataatgacaatatcctagaggcgatttttacttctaattccacaatgattcccaaagattctgcaccttggacagtaatcactgtccaggatttaaatcacaagatctttaaatcacaagatctggattcgggagaaaacgaggtcacatgtctgatataagaaaatgcaccttgagaaaaatcttcctccaataattaactacatgcttgtaacaaatggggccgtggaccaggaacagacccaaggtataacatcagcatcactgccactgacagaggcaaaccaaccctctcgtccagcccaagcatcaccctactcattggcgatgccaacgacaatgctctggttttctaccaggcctcctacgtcgtccacgtggccaagaacaatcttcccaaagcctccatagtgtgcaagtagacacctccaacctagacttgggacccaacagccaagttccctattccatcgtggccagtgacctggagccacaggcgctgtgattctaggtgtccttgagcgcacagtgcgccttcgaccaagagcagccgcgagccttcaagctcacgctgcaggcccgcgaccaggactagctcgcgctcggcgtcaacgtgagcctgcgcgtgttggtggacgacctgaatgacaacgcaccgcgggtgctgtaccccagctctggagcgcaatggcttcgcgctcttggatatggtgctgcacgccgcggagcctggctacctggtcaccaaggtggtggctgtagacgcagatgtgagacacaatgcgtggctgtcctaccacgtgctgcaggccagcaagcccaggctcttcagcctggaatgcgcaccgacgaggtgctgacagctcgcacgatgggccacaggaaagcgactcgccagcgcctactggtcgcggtgcactgcggtggacagccgctcctctcgctaccgccacgtcaccaccactaccgcccctcgtcgccgacagcctgcaggagactctgccagacctcagcgatcactctgcaaagctacagcctgaatccaaaattaatttatatctggtgattgccttagctttaatttcctttttattcttcctgattgcattgtttgtgctggttttaaagtgccgaagaccccaaaatgatcctgtctgagtctttcccacggatgtctatcccgcgctaagccccaggtttctgggtaactgtagctctatgatgccatattcctaccaggtgtgtgcttctcctacgaatccagggctgagtgaacttcttttttgaatccctacccctcaggactcaatagcagtttcactgcagaaagccccttggggaaggggatgattgtgattattctaattgcttgggcagaatccactctccaaggtgaaaaattcttgatgaaactaagttcagtcacaagcaggttttcttctagcattaaatattttcagagatctcagtaaaaagcatttctagcagcaagaccaaaggcctaagatgagaaatatttggcatggtgagcttgagggacagtagtcaggcagacaagagtatcagacatgccagagcatttggggcctgtaggtaaggagcatgttttgattatatatatttgtatgtgtttgattatattttataattttactttgatattcaaattgtactgatccaaaaataagggagggacaaatcttggccattgtagtatgagagatgtaaatttacaactcagaatccctgcttatcacttctccttcagcacacaactgtttcattttctatttaagaaacttcctctcactgcaaaaagacattctggctgataaagttagcctataatttcagtaaatctaagaatatgactaatggaagttgccagacctaaactttgaaaattattgttccactgaagagcgtcttatgactgagtgttccagtctccttctcaagctgaaccttgcttttcaaaccagattaagaacactatcataagttatactgcattttatttccctacccatgtccactgcatcattctctatagtacaaagagcttgtctcgccaggcgcatctataatcttagcactttggggcgccaaggcgggtggatcacttgagcccaggagtttgagaccagcctggacagcatggcaaaaacccatctctacaaaaaaaaaaaacaaaaattaacaaggtttagtggtccatgcctgtggtctcagctacttgggaggctgaggtgtgaggatcacctgagtctggggagattgaagctgcagtgagctgtggttgcgctcctgtactccagtctgggtgacagaattagaccctgtcccaaaacaaacaaacaaataaagagcttctctccttatgacttatttaaagcttgggaaattgttccaattcaaatgctttaaatggacttgagctaaaacagaatgtggtatatgaaatgttcttataatcaggtgattgtaaaaattgatccagataatgttagcatagcattttactgaactagtagtttacaaacacttcaaaaattatagaataacatttgcatataaaattcctcatacatttccctatcagtgaattggaagcttacaatatacaatattaccaaaaagacaaaaaaaatgaaaaggaaacagttacctttggaaaacataattaggtaaaatgggtaatatggaaagtctgaaaactgaaaaaattactgataagtcaagagaaaaggaatattagtaggaaaattcataaaagtgtgtctgactactcacagcaggtttccttattggtatgtattctgtggtccatctaagctatgttaattttattttaaatgctacctgggtattggcttctaaaaggaattcagtaaatcagataatttggcatcttcaatctagattctgatgctcacctgaaaagtctgctaaggattggaaaccaagaaaagtgaagtatctcaacagatatgtgtcacttgtgtgtactggattttttttttttttttttttttttttttttttttttgagatggagtttcactcttgttgcccaggctggagtgcaatggcatgctctcggctcactgcaacctccgcctcccaggttcaagtgattctcctgcctcagcctccctagtagctaggattacaggcatgtgccaccacgcccagctaattttgtatttttagtagagacggggtttctccatgttggtcaggctagtcttgaactcccaacctcaggtgatcttccctccttggcctcccaaagtgctgggattacaggcatgagtcactgcgcccggtcgcgtactggatttatattgtgtaatactttgctctagcagtatagtaggtgagacagtgactgtgtctagtgagcaaaaggcacttatttgacacttttgactcttcctttctacttaccttatttaaaattgatttttgcatgtggcatgatgcaccagttcattgaggtaggggttgaagttatttcccatttttttcaataccatttattaaaaatattttcctctttctgttgaatttgcttggtgcctttgttgaaagtcatttcactgatatatgtagttctatttctatattcttgatcatgtttcatttgtctattcttttactaatagcacactgtctcaattattgtagctttatagtaagtcttgctacaaagtcttactacaggacaaagcttgtaggatttttgaatgggatggcattgcatctatacctttatcagggaaagagggaaggagggaggaggatcatcttaacaatattgacacttcaaatccatgaacatggtatatatttccatttaattaggtctttaatttctctcagctatgttgtatagttttcagtgtagagaggtcatgtatatttctcattaaattgtccctacatatttgatgttttctaatgttattgtaaatagtatttttaaaattgtatcttctaattgttcatttctagtttacagaaaaatgaaaaactatgtttttatgtattctatatgcttttgaaaagtaagaggtgcaaagtgctctattcttacactatattgtgtgagaatataagtcgaaaccactctgcataagttcaggcttccattctcttcagtttgtaggttgagagaacccatccagaaacagtaaacattggtgtctgcccaagtctggtcctgggtggttcattcattcatttacataacaaatatttattaactgtctgctatatgcaaggcactgacctatggactaaggatgcagcaatgaacaaggcatatatgattcctgagttaatgggccctattctaatacatgatattttacaggtctgataaaagccaacaaggagaaatacaaaagcactaagagaaagcttatagtagggaagcttcgcctaatctgaaggtcaaggaaggctttctttttttcggaaagtgatatttagagagatgaatagattaataggatgagtagaagttatctaggtaacaaggaaagtaaaaaagaaattgtcaggcagaggaaatagcatgtgtaaagatctttttaaaaaataaaaggtgtgactcaagcaatttaaaagggctagggaggctagaaacagaaaataaatagatgaaactaataaggcagggagagccttgtaaatcacacttaaaattctggattttgttctaaatacccttgtacttaggagctattaaaatattttaaacaaggcagtgacaagatatttgaattattaagcttactctggctgctatatggagaattgatttatgagggttataaatagaaataggaagataagataggagactatggcaatattcctggtaagaaatggaagaagagctggcttggattaaaggggaggcagtggatgtagaaataaatggatgaattatagatatatttaggaaatgggttcaataagacttaataatggaataggtggaatataaatttcatgagggcagggggtgttttgtttattattatattcctaggtgtctgaaaatattgttgtgttgcctggcaagtggtagatcttcagtgaaatattattaactgaataaatacaatggataaatggggagcagggattaagagtgattcctgggtttccacattaaggaactggatggacaaagctaccatttgatgagaatggaagactaaagaatgatagatttaagagaaatcgagttgagttccagccatgttcatttgaaggatctgagaaacagtgcagatattcagtgtgtgattagacatatggtcatcattcttttttttttttgagatggagtctcgctctgtcacccaggctggagtgcagtggccctatctctgctcactgcaatctctgcctcccaggttcaagtgattcttctgcctcagcctcctgagtagctgggactacaggcgtgcaccaccacgcctggctaatttttgtatttttagtacaagacagcatttcaccatattggccaggctggtctcgaactctgatctgcccgcctcggcctcccaaagtgtggggattacaggcgtgagccaccgcgcccagccggttaccattcttttactctgagttcttccattgtgatcatctagtcagatgggtagatccttataaggctgagcataataagcttcctgatagctctacactggtatgttttggggttcatggctgagctacttttgtgttttatttatcttcctgatctctttttcactgtaagaaacatccagcacccagggaaatttgctgtctaattcatactccactcttcagactagtcctagtgttcagttttgttttgttttttttctgtgtctggaattctattaaaatgtgtcaggctgttttaatttttgttgtttaattttctttcacatgattatatgtgctccatggatttttttgtttgtttgttttttgtttttgtttttgtttaagcggggtcttgctcttgtcgcgcaggctggagtgcaatggcttgatctcggctcactgcaacctccgcctcccgggttcaagtgattcttctgtctcagcctcccaagtagctgggactacaggcacatgccaccacacccggctaatttttgtatttttagtagagacgggtttcatcatattggtcaggctggtctcaaactcctgaccctggtgatctgcccacctcggcctcccaaagtgctgggattacaggcgtgagccaccgcacccggaggaaatttttaacctcagtttttcttcaccatctgtaaaactgcatagaaggaatgtttaggataaaagatgcataacaatcataacaaaattgttgggttttaatgttatgagtacacttggaggattctatgtccacacataccttaaacatcctatagagtccttagcattttaaagttgaaaccaacagtatgaatgatggtagaattttcccccccaggaagttagaactgttccatatcttgatagagggatgggttataaggatgtacacattttccaaaactcattgaacttaagagtcttgcatgtgactgtatataaattatactttaattgaaaataaatttaagaaaataaaattggctgggcgtggtggctcacgcctgtaatcccagtgctttgggaggccgaggtgggtgaatcatctgaggtcaggagttcgagaccagcctggccaacatggtgaaactctgtctccactaaaaatacaaaaattagctgggcatggtggcggacacctataatcccagctactcgggaggctgaggcatgagaatcgcttgaacccaggaggtggaggttgcagtgagccaagatcatgccattgctctccagcctgggcaacatgaacgaaatgccatcttaaaaaaaaaaaattaaaagaaaagaaaattagcctcccccaccctcactatacctcagactcacccctgaaagatcactactattcatccctggttatgtacacttacaaacattttctgtgtgtatgcgaatgtatgtgtggggttttctttgcacaacaggatcattttacagtatatatactgttgtgcaacttgctctttccacttaatatctcaaggaatcttttctttgaatctttatagccatgtacctcaatcttagtagttttctttattttatttttgaataggaaatacatttacatggttttaaaaatcaaaacaatatactatgtatatattgagaagtctgacttccatccctatcctactcctattccacccttgcttcctcctgtcccctgtaggtaaacattttataactttattaagcatcctgtcagcatttcttatgcaaatatgtacatatatttttatttccccattttttttacaaaaagataaaatactatacaccactttatatcttcctttcttcacattatatcctttaaaaatatttccatattggccgggcgcggtggctcacgcctgtaatcgcagcactttgggaggccgaggcgggaggatcacgaggtcaggagatcgagaccatcctggctaacacggtgaaaccccgtctgtactaaaaatacaaaaaaaaaaattagccaggcgtgatggcgggcgcctgtagtcccagctactctggaggctgaggcaggagaatggcgtgaacctgggaggcggagcttgcagtgagccgagatcgtgccactgcactccagcctgggcgacagagcaagactgcaactcaaaaaaacaaacaaacaaacaaaaaagaacttccatattaatatatagaaagctgttttttttaacagttgcttagcattcctttggattattaaccagtctcataaatgagcgctattgaatagccctgtacctacatcagtttttacatatgcagtatatctttgggatgaattcccagaaatggaattgaaattgctgggtcaaagaggaaataggtgtaattttcttaggtattttcacaagaagtgttaattctaactttctgttttgaaatgatttcaaattttcaaaggagttgcaagaattgtacaaagaactgtatctccttcacccggatgcaccgggtgaattatatgtattatataattgtatctgtaggccaggtgcagtggctcactcctgtaatcccagcactttgggaggctgaggcaggtggattacttgaggccaggagttcaagaccagcctggccaacatgataaaactccatctctactaaaaatacaaaaattagccaggcctggtaccccatgcctaagggtgaggcatgagaaatgcttgaacctgggaggcggaggttgcagtgagccgagatcgcaccactgcactccagcctgggcgacagagcaagactctgtctcaaaaaaaaaaaaaaaaaaagtaaaaaagttttttaaaaagatgtatctatatatacatatttacatacacacccaagtgtgtatgtatatatgtttgtgtgtatgtacacaaacacattatttttatatgatatgatttttttatgacatgattatttttatgacatttgagagtaagttgtagaaattatgtttctttattcctaaatacctcattgtgtatttcctaacaaggacattcttttatataattaaattttaataataaaaatcagaaaatttaacatcaatgcaatataattatttagcctatagtccatatttaaattctaccataccttatagtatattttactatacctcatagtaattttttttagtccaaaatatcacacattgcatttagttgccatgtctcttttttttttttttttttgagacagggtctcactctttcgcccaggctggaatgcagtggtatgatcttggctcactgcaacctccgcctcccaggttcaaatgattctcctgccttagcctcctgagtagctgggactacaggcatgtgccaccacactcccaccacacccagctaatttttgtatttttagtagagacaaggtttcactatgttggccaggctagtcttgaactcctgacctcaagtgatctgcccacctcagctaagtgctgggattacaggcgtgagccaccatgtgtggcctagttgccatgtctctttaatctactttaatctgaaacagttcctcagccttgtttgtttatatgaaactgacatttgtaaagactagaagccatttgtcttgtataatgcctttaatttatatttgttttatgtttcctcgtgattttatatatagagtttgtttgtttgtttgtctgtttgtttgttttgagatggagtctcattcttgtcacccaggctggaatgcagtggcgcagtctcggctcactgcaacttctgcctcccaggttcaagcaattctcctgcctcagcctcctgagtagctgggattacagatgcctgccaccatgcctggctaatttttgtacttttagtagaaacggggttttgccatgttgcccaggatggtctccaactcctgacctcaggtgatccgcccgccttggcctcccaaagtgccgggattacaggcatgagccaccgtgcccggacctcatgattgtatttatttatttatttaatattattattattatttttttttttttgagatggggtcttgctctgtcacccaggctggtgtgcagtggtgcgatatcggctcactgcaaccgctgcctcccagattcaagcaattctcctacctcagcctcccaagtagctgggattacaggcatgtgccaccacacccggctaatttttttgtattttttttagtagagacgaggtttcaccatattggccaggctggtctcgaactcctgaccttgtgatccacccaccttgacctcccaaagtgttgggattacaggcgtgagccaccacacccagccttatgattgtatttagactagacatttttttggtagtatattatttagccattgctgtgtaacaaattatcccaaaacttagtggcttaaaagaagcatttattatctcataaattttgtggatcaggactgggtatagctttgctgagtgcctctgcctcaaagtcttacaaggcagcaattaaagtgtcacctaaggctattgtcttatctgaagggtcaacagaggatggatccgcttctaatctctctcacatagttaatggcaaaattaagttccttgtggattgttagactaagggttccagttccttgctggttgttagcttgaggtctacctcagttccttgccatgtggacctccatagggcaaccagcttctgttagagcaagtaaaggagagtgccagagagggcaaatgtgatgaaagccacaatctttttataaacctaattttgaaagtgacatacaaggctaggcatggtggctcaaacctgtaattccagcactctgagaggccaaggagggtggactgcttgagcccaggagttcaagaccagcctgggtaacatgacaaaaccctgcctctactaaaaatacaaaaattagctggtctggtggtgcatgcctatagtcccagctactcaggaggctgaggccagagaattgcttgaacccaggaggcggaggttacagtgagccgagatcacaccactccactccagcctaggccacagaatgaaaccctgtcaagaaagaaaggaaggaacaagggagggagggaggaaggaagggaggtagggaggcagggaaagaccgagaaagtgacataccatcatttttgctgtagtttgttcattagaagcaaaatcacttggtccagcccacactctggggagatgattttctaactccatttgtaataacttattctacttttattagttggcattatacagtaagaaagagctttcttttctcttcttatttattcatatatggctcatgtgttttttccaatgagttatattctattactaacattttttattttgacctcaaattgttttagatgttaccaataagaacctcttcaagctggttcttgtgtccttttgccataactctctcattttcttgaaccctttcttactttctgatataagaaaatattagagactcatactttccttgttccagttctgagatgaaccatttatccaaaagccttgcttcattttagtagggaatagtatttagaaactaagatctgggtgtgaggtatgctcactgctaatgggctgtcactgtttctaggccttgtcagcagacggagctaggaaaaacacacataaacacacccatatttatatttgtacacacactccctcaaaatcgtgagttcatattgatacctccagttctggttcttcctagccttccccctttccatctttgtatttttattttccaacagtaagaaccctggctcccagtgctatgaatatatttactcatttgctccatccactgcactccagcctaggccacagaatgaaaccctgtcaagaaagaaaggaaggaatgagggagggagggagagaggaagagagagaaggaagaaggaagggagggagggaaaactgagaaagtaacataccatcatttttgctgtagtttgttcataagaagcaaaatcacttggtccagcccacactctggggagatgattttctaactccatttgtaataatttattccacttttattagttggcattatacagtaagaaagagctgctgaagatttgcttgcaattggttgtctttaaactgagggtatattgtcaaagtactgtgctgaaaagttacctgtagtatagttatgtgattcattaaaataaagtttgtttctattatgtgcagttttagagttttgccacactctggttgattagtatattttctgttgcttttttgttttgttttgttttgttttgtttttgagatagggtctcgctatgtcacccaggctggagtccagtggtacaatcacagctcactgcagcctcaacctcgtgcacttaagcgatcctcccacctcagcctcccaaatagctggggctgcaagtgcacaccaccatgactggctaattttttaattatttatttatttatttatttattttagagatggggtctcactatgtttccccaggctgaccctgaactcctggggtcaagtgatcctcctgccttagcctccaagtgctggtattacaggcataagccaccacacctagcctagtattcttttttgaatatgtaaaacattaacataaagtcaaaactattaaaaaaaggtgtactcagaaaattgtcattcctcccctataccttctgcctcattcacaccacactctgtagataatcgatttcattagtttgtggtttatcctcactgtgtttctttttgcaaaacgcaaaaacaaaacctatacatatttatattttcttatgtcctcttctttcttacacaaaaggtaacacactatgtaggtagtcctggctttgaacagtttcactataaaaatatttgttactacagcttaaataacataagtctcctaaaaataattcaaattttagttaccatggtatattaactttgagtagttccataaaggacaaacttggctgctagcccttcagtccacagagcactttgaaaataacagatgagcaaaataatgtggccaatcacatgacttctttcaaagtatgtcagtgatcagtcactgtgtgcctataatttagttcatgcacagacagcaaagcatgtagttgtgttgccttccagtgataaacccacataacattttagaaaaatgtattaagaattggccagcaaagataaaagtgcagcaaagaaacaaaagtgataatgttttcagtgaaatttgaattgaacataaatggagttatagaagaaatagctgaccatgggaatgttcacactgctactttcaagaatctctagaagggcagctaaaggagcttagtgaaggtgaatttattgacatgaatgagaaaagtaattgtgatgaaaaggatgaagatgtcccagagaaagtaatgccagcaaaaacttcacattaaaggaactctcagatatttcaaagcattgaaacctccaagaataaataaaatgttggaagttgatccaaacttagaaaggagtatggcaacttgtcaagatgaagaaaaggtgcttattcctttttatttatttatttagagacagagtttcactcttgttgcccaggctggagtgcaatggcatgatctcagctcaccgcaacctccacctcctggattcaggcagttctcctgcctcagcctcccaagtagctgagattacaggcatgtgccaccacgcccggctaattttgtatttttagtagagacagggtttctccatgttggtcaggctggtctcgaacccccaacctcaggtgatctgcccacctcggcctcccaaaacactgggattacaggcatgagccaccatgctccacctgcttattccatattatatgttataggatgaaaagaggccaaactaatcttgacatgttttttacaaggaaataatcctccatggttctaatttttttttttttttttttttttttttttgagacagagtcgcgctctgtcacccaggctggagtgcagtggcacgatcttggctcactgctagcaccgcctcccgggttcacgccattctcctgcctcagcctcccgagtagctgggactacaggcgccggccaccacgcctggctaattttttaaaaaatatttttagtagagacggggtttcaccgtgttagccaggatggtctcgatctcctgacctcgtgatccgcccgcctcggcctcccaaagtgctgggattacaggcttgagccactgcgcccggtgggtctaatgttttaaattacactgtgttaaataaatattagtttgttggttttttttttagtttttttatttctctacaaatttacaaccaataagagtttttaatgctttgacaaaaaatgttaaaggtcatagtacaatcgcatttcttcccattgattattaacatcactttacatagtttcatcttgcattagcaattttgtgtgtgtgtttgtggttttaaggagcggagagtttaataggcaagaaggaagggagaagacagaaggaaggagctcccccttacagagacagagggagcggggctccaaaagaggaggtccccatctaccgcggataccagccaggtatatatgcagaggctggtggaggtgatgtctgatttgcatagggctcaggggattggtttgaccaggcatatcattcacgtagcccgagaaaaagctggccctcccaccccagccttttaatatgcaaacgtagggcgccatggatgttctaaacacgtggagatatgtggggggcagccatgtggccaggaacttgtggggcaagggcaagaaggctgtgggaatcgccaagttgaatggacctagtttctaatggcctgcatttgcatatcaaaggttgctggcctggctcctagagccggggctttaaaagaaacttttccggagatgctttaaaaaatgaaaacttcccaaggaccccttttcctgtctatctgcataaaataatttcttttattatttatttatttatttatttatttatttatttatttatttatttatttattttgagacggagtctcgctctgtcgcccaggctggagtgcagtggcgcgatctcagctcactgcaagctccgcctctcgggttcatgccattctcctgcctcagcctcccgagtagctgggactacaggcgcccaccaccacgtccggctaattttttgtattttcagtagagacgggatttcaccgtgttagccaggatggtctccatctcctgacctcctgatccgcccgcctcggcctcctaaagtgctgggattacagaataatttcttaataactcctaccacattcctccctgtggcgatatcaaactaactgctgttaggaggctttgggcgaccattgcttctggctacttcctgctgaaaaggggcgtctaatggagaacagcagctagggctcctcctggggttgatctaagggtcctcggaagaatggcgtccatgtgtggttcagtttacagcaccgtttggagtttgattgcttctaggcgagaagaaacaattcaagttatagtattgagtatacagagtccaaatatcaatacaagacatataagcaagagagtgcttaataaaggggttaaccaattccataaagaagactggaagtaattaaagagggattgtagccactcggggctgaagcccacattttccctgagcctgtcaataattttgatttgatttttaagtccctgtagatttgcctcttctttactacaggtgttaatcccaaagaagcatgtttcatttaaaaatgcattactggccaggcgtggtggctcgcgcctgtaatcccagcactttgggaggctgaggcgggagcatcatgaggtcaggagtttgagaccagcctggcctacatggcaaaaccccatctctactaaaaatacaaaaaattagccatcgtggtagtgggcgcctgtaatcccagctaattgggaggctgaggcaggagaatcgcttgaacccgggaggcagaggttgcagtgagccgagatcgcaccactgcactccagcctgggcaacagagcaaaactccatctcaaaacaaaacaaacaaacaaacaaacaaaaactgcattactaaatccaataaaaagtcctagtagactcagtgatagtaaaactttcatgcttcctttttgccagtaactattatccctgctataaggatactaattaagcaaaatacgacagcaatggaaactctgtccaatatttcagttagaaggtgctaccatggataaccctattgcaaatagtagagtgaggaaagcagttcccacaaatgtggtgtggtaggtaatttccatctaaaattttacttgccaacatatagaattcccctctgtgggcctacgaagttccttggttttattttcccaaacaaagaaacctccgggttacaggtaccttacttactttcattacctggcacaatttgcaaaataattgcccagaactagcatattgattcacattttcacattacccatccctttttcccccccaccaagctgcagaagatcaccacttgattcacaggaataagcagggccagggttagtctaaaatgtaggcaaaaagcttaaaaacaattaatgagactagggtttaatgacaaatgtatgataagctttggagcaaaatttttctctccagtcctcatttttggtaaaaactaattatgaatgaactttaatcttatacttggcctgattatttgcatgaagtgcagcaagaatggttatttctacataggacttttggattggctttgatgaaacactgttccacaaggaatttcagattagacttttaaagctgagcccagacatgggtttgtatcctctaatacctgtgagttgggttatcctctcctcttgaggtcccaagataaactcagagcttccagacctgttagaaagtgacattcttcactgaccacaggttaggaaccctgtgtggggactgtgtagacaaggtgtgaggccagttctccccaaggggcttttattggctctgcatgtcaagcttgattccttaaagggaaacacaccctttcagttaaagccttggcaaaataaccggtttttccaattgtgttctgttgacaaagaaaaatggattcttgctgcactgatgcgaacaactatattgccgtaagttaagagtacttacagatagtctccaaattttagaggaaccaggcagagaaaaatgaacatgctccaaattttgttcacagtagtataccttacttgattattaaaggccataaatagtttaaaataagtttcctttcccagtccatgcaccaaaatgatacggctctgatgagtggaggaacaacagggttcctggtcctcatgctggtttagataaaatgacacagacacatgtggagtggttttaaggagtggagagtttaataagcaagaaggaagggagaagagagaaggaagacgctcccccttgcagagacggagcgggggttccaaagctgaaagaggaggtcccccacattaacaatttttaaaataccgtacaactgcagaaaatgaggactgcctgtacatactgtttgacactttgtttttttttttaacttatcaactttattttgtttgtttgttttggttttgggtttttgtttgtttgtttgttttggagacgagtctcactctgtcagccaggctggagtgcagtggcacaatcccagctcactgcaacctccacctctcgggttcaagcaattctactgcctcagcctcccgagtagctgggattacaggtattcgccaccacatccagctattggttttggtttttgagacagggtcttgctgtgtcacacaggctggagtgcagtggtgtgatctcagctcactgcaacctctgcctcccaggctcaagtgatcctcccacctcagccttccaagtagctgggactacaggcatgcacaccatgcgcagctaattttttctattttttgtggagacggggtctcactatgttgcttaggttggtcacaaattcacagcctcaagcagtcctcctgcctcaccctcccaaagtgctgggattacaggcatgagccaccacatccagccttaccagctatattgaagtataatttatataacataaaatttgccttttaaaattatacagtgcaatgcattttgacaattgtttacatctgtgtaaccaccatgcaatcaaaatatagaacatttctataaccttcaaaagttccctcatgcccctttgcaatcaattcactacttctccagctccaggcaacaactggtctgcttcctgtcactataaattagtgttgcctctttcagaatttcatctaaatggaatcctataacatatactattttgtatccatcttcttttactccaaagttcttgaaattcattcatgttcctgtgtgtatcagcagcgtgttccatttgattgttgagcagtattgcattgtgtggatatatcacaatgtgttcattcattcaactgttggtggacatttgagttgtgtccagtttagtgctattctgaattaaagtgatgtgaacaatcatgtacaagtatttttgtaggcatattttttttatttctcttggataaataccccaaaacagaattgttttgggggtcatatgaaatgggaagtatatgcttaactttataagaagctgccaaactatttttcaaaatggtaatatcactttacattttcatgagcaatgcataaagcgttccgcttgctacattttctcaccaatgcttcctattgtcaattttttaaattttagcaattctagtgggtgtgtgatactatctcattgaagtttcaactgtttttccctgttgactagagacactgagcaacttttcatgtgttgtctatttgtatatcttcttgaagcattcgttcatctttaactgagctgaacgccttcttaaaattgagctatgggagttttaaaatatatccttgtagctgggcgtgatggcaggtgcctgtaatcccagctactcaggaggctgagacaggagaatcgcttgaacccaggaggcggaggttgcagtgagccgagactgcaccactgcactccagcctgggcaacagagtgagacttcatctaaaaaataataattatacatgtaattatatatgatttttatatatgtaatatatatattcttgatgtgagctctttgtcacatacatattttgtggatattttatcccagactatgacttgtcttttcattttcttagttgtgtcttttgaagagcagaagatgtaattttgataaagcccaatttattttttcttttatagtttgtatttcttatgtcctattcaaaaactccttgcctactgaaaacttatgatgattttctcctatattttcttttagaagttttatagttttaccatttataatttggtctatgaatccttttgagttgatgtttatgtatggtgtatggtgtgaggtaacaatgaagattcatatttttttccaaaggaatatccaattgtctctttggaaaaatatgctgagaaggctatcttttccccaccaaataatcttagcaccttaatcaaaaatcatttggccatggacatatgtaggtgtgggttttttctgggctctctgtgttagatggatagatagacagatacagatatataactgtgtttacacatatgtaactgtaaacacagttatatatctatatatccaccaacagttgaatgagaataaactattgttataagcatatatacacattgtatatatatgtgtacatatacatattgcatatgtatgtatacatatatacacacaaagtatatatatgtatgtatacatatatacacacttaaagtaatggcctccagttcgatccaagttgctgcaaaggacattatttcatgccttttcgtggctgagtaatattccatggtgtatatatatatatgtgtgtgtgtatatatatgtattatgtatatatatatgtgtgtgtgtgtgtgtgtgtgtatatatatatatgtgtatatatatataccacattttctttatccactcattagtcgatggggacttaggttggtttcacatttttgcaattgtgaattgtgctgctataaacatatgtgtccaagtgtctttttcatataattacttattttcctttgggtagatacccaatagtgggattgctggattgaatggtagatctgttttttgctctttagagaatctccatactgttttccatagaggttgtactaatttatattcccagcagcaatgtgtaagtgttctcttttccccacatccacaccaacatctattgttttttgactttttaataatggccattcttgcaggaccaaggtggtagctcgttgtggttttaatttgcattttcctgatgattagcgatgttgagcattttttcatatgtttgtgggccatttgtataccttcttttgagaaatggctatttgtgtcctttgcctactttttaatgggattgtgttttatttttcttggtgatttgttagttccttgtagattctggatactagtcctttgtcagatgtgtactttgcaaagataatattttggatgttatatttccattataatttagttcaaagtattttctaatacaccttgcaatttcttctttgacccatggattattttaaagtttgttattttgtttgtttattttgagacagagtttcactttttttgcccaggctggagtgcagtggcacaatcccggctcccagattcaagcgattctcctgcctcagcctcccaagtagctgggattacaggtgcccaccaccacacccagctaatttttttttcttttttttttgagacagagttttgctcttgttgcccaggctggagtgcaatggcacgatctcggctcactgcaacctctgcctcctgggttccagcaattctcctgcctcaacctcctgagtagctgggattccaggcatatgccaccacgccaggctaattttgtatttttaatagagacggggtttcttcatgttggtcaggcgggtcttgaactcccgacctcaggtgatctgcccgccttggcctcccaaaatgctgggattacaggcatgagccactgcacccagtccaattttttgtatttttagtagagatggggtttcatcatgttggccaggctggtcttgaactcctgacctcaggtgatccgcctgcctcggcctcccaaagtgcagggattacaggtatgagccaccatgaccagcctaaagtgtattgtttagtcaccaaatatgtaagtattacccaaatatatttgtcactgatttctaatttaattgtattgtgatccaaaaatatacattgtatagtttctattcttttaaattcgttaacatttcttttatggcacagaatatggtctatcttggtgagtgttgcttacacacaactgtgtaactgaaaactgtgtattctgcttctcgtggttgttgtatcctataattgtcaactagatcaagttagtaagagtgttgttcagtgatcttttcttcttcagtgtttactgtatttgctaatcccatccagtgaagtttccatttcatatattgtatttttcacttttagaagttccatttgactctttcatttccatcctcaattatcttcatatttttctttaaatttttgagcacatttataatggaggttttaaagtccttgtctgctaattttgtcacctctgtaattcctatgatgattttcttcctggcttggggtcataatttgttgcttatttgcatgtctaataatgtttttattggacagcagacattgtaaatgttatatttttgagtgtttggattttgtctttctttaagaactattgcagtttgttttggaaggctattatgttttttgcagatcaggttgatcttttcaaggcttgtttttaagctttgttaggacaggtctgtagtaacttttgccttgggctaatttagacctaccacttaattctgacttttttgattaatctgagtgttcagcagggtctctttattatggctaaatgaaattcaaacattttccagccctatgtgaccatcaagaattcagctaatagctccctggcagttcttcgcccagctgcagaaaagtgtcagtgcactctatgtatgctcagattattatttagccaaagacttggggatccatattaatattcctggagttctttgtgtagctccattctctttagtactctatcccataaattctggctgcctcaatctcctaatctccccaaactctaatatctattcctcaactcagcaaaaccatggtgttattcttggatttcccctttcctgccccacagtctgaaagttgtctccaggcaaaaaaaatggagatcctagtttgcggatcctcatttccttctccttttttttttttttttttttttttttttgagatggagtctcgctctgtcacccaggctggagtgacgtggcgtgatctcggcttactagaaactccggctcccgggttcatgccattctcctgcctcagcctcccgagtagctgggactacaggtgcctgccaccatgcccggctaattttttgtattttgtttagtagagacggggtttcaccgtgttagccaggatggtctggatgacctcgtgatctgctcacctcggcctccaaaagtgctgggattacaggcatgagccaccgcgcccggcctgcttctcttctcttatgggttagaatcctgcactgtcttttgaacaaatgtctaaaagcttttatcacacattttgatccacttcccagttgttatagtggtatatctggtttcacatgactgaaaggaaaagttttcaccttgctttttgtactaataatatatcctggaaatcattctatataaatttatagaaatcttcatttttaaaatagcttcataaaactccattgtaaaaaccaggtgcagtggctcatgcttgtaatcccacactttgggaggccaaggcgggtggatcacctgaggtcaggagttcaaggccagcctggccaacatggtgaaactccgtctctactaaaaatacaaaaattagctgggtgtggtggtgggcgcctgtagtcccagctacttggaaggctgaggcaggagaattgcttgatttcaggaggcggagattgcagtgagctgagattgcgccactgcactccagcctgggctacagagcgagactccgtctaaaaaaaaaaaaaagcaaaaaaaaaaactccattgtatgtgcacatatcattatctgttcaacccatctatgacttgtcatttaggtagtttccatccaatatttttgcaatataaaaaatgctaatgaagaacctgagatatatatatatctatatatatagatatatatgtttgttgttgttgttgttatttttgaagtatgtacgtataataaattcctaatagtgtgattgctgcatcataaggtaaaggcatatgtagttttgttaaatatagctattccccatcttgcattcctacaaatagatgagaatgtccattgtcccatagtctcctttgcagagtatattgtcaagctttttaattgttgccaacctgatgggtaaaaagatatctccaaataattttaattaaaatttctcttattatgaatgaggttaaatagtttttcatatgtttaaaagccagtttatatctttttgtttttttagagacaggaatcttgttctgttgcccaggccaaattgcagtgatgcagtcatagctcactgtagcctcgcactcctgggctcaagcaatcctcctaccttagcctcccaagtagctaggactacagatggatgccaccatgtccagctaatttttttatttttttgtagagatgtgaggtctcactatgttgcccaggcttgtcttgaactactggcttcaagtgatcctcccacctcagcctcccaaagtgctaagattacagccatgaaccaccacaaatgaccctatatatttttttgaattgtctgttcatgtcttattttcatttttctagtagttttttttttaagtgttttagcctaaatttgtaaaaagtttaggggatatatgaagggactctaaatgtttatgaagaaatttaattaaaagataaaaataaaaatataagctttatttttcaacatgagctccatcaagttcaaggcacttttgtaagcaatgatactagccatttagttcacccctaaagaactgagagtcctgggaatttagccatgtcaatgcagtattttttatattggttactgaagaaaaaatgggtgccctttaaagttgtaagattaggaacaaaaacaagtcagaagaagccaaatcagcactgaaaggtgggcacttaatgattacccaagaaaactctcaccaaattgcccttgcttcatgagaggaatgagcgggagcattgtcgtggtcaggaaggattctggggaagttttcccaggcattttttctgctgaagctttggtaactttctcaaaacactctcataataatcagatcttatcactctttggccctccaggaagtcaaccagcaaaatgctttgaacatcccaaaaaagcgcttgccatgacatttgctcttgaccagtctgcttttgcattggtcaaatgccaccacttccacctcttgtgctttgttttcaggatcagactggtaaagtcatgtttcatctcttgttacagtttttttttttttaagaaacccttcaggatcttgatcacatttgtttaaaatttcaactgaggctgggcccagtggctcatgcctgtaatcccagcactttgggaggccgaggcgggcaaatcacgaggtcaggatttcgagtccatcctggctaacatggtgaaaccccatctctactaaaaatacaaaaaattagccgggcatggtggcaggcacctgtagtcccagctactcgggagggtgaggcaggagaacggcatgaacccaggagacggagcttgcagtgagctgatatcatgccactgcactccagcctgggcaacagagtgagactccagctcaaaaaaaaaatcaagtgaaaactctggtcttaaactgcagctgatctattttatttttattttttttcagacacagccttgctctgttacccaggctggagtgcagtggcaccatcatggctcaatgcagccttggcctcgtgagctcaagcaatcttcccacctcaggctcccaagtagctgggactacaggcacatgctaccatgcctggataatttttttgcagctaatctagatgtaatggttttggcacccatctaatggaaagtttgctcaactttaatttttcagtcagaattgtgtaagctgaaccgagatgtctatggtgttggctattgtttctgctgttaattgtaggtcttctttaattagagcacagacaagatcattttttttcctcccaaattgatgtagatggtcttttgctgtgggcttcatcttcaacattgtctcatcccttcttaaaacaagctagctacttgtaaactgccgttttctttggagcattgtctccataaacttttcacaaaacatcagtgatttcaccgttcttccactcaagcttcatcataaatttgatgtctgttcttgtttccattttagcagaattcatgttactctgataggggctcttttcaaactgttatcttattcttcttagtgcctcaaactagatcctattcagacatggtataacaagttagtatgggtttattttggtgcaagaaatattttgaaatccacacatttttttcataatatgcattttccatgaagtttttgaaaactccttgtattaggaatattagtcctttgtccagtaaacagactgcaaatattttctcacagctcatcatttaccttttggcatttttttgcaatgcaatttttttccctttgtttttgttttttgtgtaatgaatcaatgttttcttttttttttttttttagaccaagtctcactctgtcacacaggctggagtacaatggtgcaatctcagctcactgcaacctctgcctcccaggttcaagtgattctcatctctcagcctcccaagtagctgggattacaggcacatgccaccatgcctggctaatttttgtatttttagtagagatggggtttcaccatgttggccaggctggtctcgaactcttgacctcaagtgatccactcacctcggcctcccacagtgctgggattagagacgtaagccactgcccccggccaaatcaacgttttcttatattgcatttaggttttaagtcatagttagaaagcctttccccacacctaggttatagaaacattcattacttttttcttccagtgctagtacttgcatggtttttggtttccacatttagatccctgatctaattggagtttattcttttgtgtgctgagatatggatctgattatatcttttttcccaaatggctatccagttgtcccaatgccatttattaagcacttcatctttgtcccagtgatttgagatagcatctttatcatgtaccaaacttctatagtgccagaagatttttattttttttagacagggtctggctctgttgcccaggctggagtgtagtggcacaatcccagctcgctgcaacctccgcctcacatgctcaagtgcccgcacctcagcctctcaagtagctgggactacaggcacatgccaccacaccaggctgatttttatatttttttgtagaatgagatttcaccatgttgcccaggctggtctcaaactcctgagctcaagaaatccgcccacctcagcctcccaaaatgctaggattacaagcatgagccaccacacccggctgccagaaaattttaatgatcagaaaaccacaattctttcttcctctgttatatgttgaagtaaaatacttcatttagaaaactaagccgggcacagtggctcacacctgtaatcccagcactttgggaggttgaggcaggcagatcacctgaggttaggagtttgagaccagcctggccaacatggtgaaaccctgtctctgctaaaaatagaaaaatttgctgggcatggtggcgggtgcctgtaattccagctacttgggaggatgaggtaggagaattgcctgaacctgggaggcagaggttgtggtgagccgagaccacgccattgcaccccagcctgggcaacaagagcaacggtaaactccatctcaaaaaaaaaaaaaaaaaaagaaagaaaaaagaaataactcagccatacaaggctacccatttggtgagaactaataataagttagatagcaaggtaatagcaaaatgtgggtgcaaaattaaagcaagttatttctgaggagaatgtaggtctcatggaagattttcatgtggacaaatttagtaaattttttgcaggtagtttcctgacatatttaacatttgtgatatagtaaacaataagaaggtactaaaggctgggcgcggtggctcacgcctgtaatcccagcactttgggaggccgaggtgggcggatcacaaggtcaggagatcaagaccatcctggctaacacggtgaaaccccgtctctactaaaaatataaaaagttagctgggcgtggtggcgggtgcctgtagtcccagctactcgggaggctgaggcaggagaatggcgtgaacccgggaggcggaacttgcagtgagccaagatcaagccactgcactccagcctgggcaacagagcgagactccatctcaaaaataataataataataataaggtactaatatgatccagactagaagagaatagcactaaaatgggagatggggtaaacctgtggttttttttaccttaggcttttgacttccaaaattattgtttttgctgggtgcggtgggtcactcctgtaatcccagcactttgggaggccaaggtgggaggattgcttgagcctaggagtttgagaccattctaggcaacaaagcaagaacctgtctctaaaaaaatttaaaaattagccagaaatggtggcacatgtctgtagtcccagctacttgggaggctgaggcaagaggattgcttgagccttttgaagttgaggcttcagtgagccatgatcaccccactgcactccagcttgggcaacagagcaagaccccatctcaaaaaataaaacaaaatagactgggcacgatggctcacgcctgtaatcccaccactttgggaggctgaggtggatggatcatgaggtaaagagatcgagaccatcctggccaacatggtgaaaccccgtttctactaaaaatataaaacttagctgggcgtggtggtgcacacctgtagtctcagctactcgggaggctgaggcaggagaatcgcttgaacccgggaggtggaggttgcagtgagccaagattgtgccactgcactccagcctggcgacagagtgagactctgtctctaaataaataaataaataaaacaaaataagtaaaataaaataaatgtttgtagttccaaaatattttgatgacataatttcttcttgttctaataaaactacatatgcattggtcctatgacctagtaatcacactattaggaatttatcataaatacacacctcaaaaattacaaaaatacatatataccagcttatttattacagcgttatttgtaattgcaaaaacattgtagatagaatggaggtcacataaaacttattcttaagattcagaccgggtgcaatggctcacgcctgtaatctcggcactttgggaagccgaggcaggcagaccacccgaggtcaggagtttgagaccagcctggccagcatggtgaaaccccatctgtaccaaaaatacaaaaattagctggtcgtcgtggcacgcctgtaatcccagctactcgggatgctgaggcgcgagaactgtttgaaccccggaggcagagactgtagtgatctgagatcatgccactacattccagtctgagcaacagagcaagacttcgtctcaaaaaaaaagatcatagatcatcttatcaaatcaaagtatgcaaaatattcaagtaaacttcagataaatatgaaggctaaaccattcagcttcttcaccaaacccttgaatgtcccacctgtctaaatggagatacatgtttgtttgatttattggttaactgtttttattccatttttcctcaaatgatcccataatttgaccttaggaagctgttcaaatagacacattaggttgaatggaaagactactcgatgatatttaggattttaagaggattttatgtattttttccttgtgtgcaataatttaatagcatcttgaataggattttctgatattactaaccctctgggaataatattaggtaattagacagttagctaatattaaaatatgtatcaggtaatatttattgagagtttcctctgtgccaagcaggatcaacttcataggcaggcgacctgtgcggggacacagggcttcatgcttagataggcccccttgctttgaaggcccctaccctttggttagggctctgctgttaccatcttgaaattcttaataatttttattttatttttttgagtcagggtcttgctctgtcgccctggctggagtgcagtggactcactacagtcttgaattcctgggctcaagcaatcctcccacttcagccttctgagtagttaggacgacaaacacacgccaccatgctcagataagttttttgtttgtttgtttttttgtttttgtttttgttttttgtagagatgggactgtccctatgttgctcaggctggtctcaaattcctggcctcaagtgatcctcccacctcagcctcccaaagtgctgggactacaggcatgagccactgtgcctggtcaatcatttttattaacaagcccaagccctcttttttttttttttttttttgagacagggtctccctctgttgtccaggctagagtgcagtggtgcgatcttaccttcactgcaacctctgcctcctgggttcaagtgattctcctggctcagcctccctagtagctggaattacaggcacccacccccatgcctggcaatttttttgtatttttagtagagatggggtttcaccatgttggcaaggctggtctcaaactcctgacctcaagtgatccacccaactcggcctcccaaagtgctgggattacaggtatgatccactgcgcccggcctccaagccccctatttttattttgcactgaccctacaagttacgtagctaggcttagttatgtttttagcaaggaaagtgtataatctcatgtaccttttgaaagattactcaggtctctgcatgtgaaatggaatttagggaatgcaagagagggagtaaaaataacagcgaggaagctatgatagcatttaaggttgctttgactcaggggtagcagtagatagggtaagtaattgatagtttcaaaatatattttgggagtagtaagcattggtatggattagtaatatactggatgtggggatgcagaaaaaaatattaaaaattacttctgaaattctggctggaatagaagtgccacttaccaggtaaggaaggttggagacataacatatttgagggtgtggtcaaaagatgagtttgacattatgctatgtcatataaaagacatataaaagactacctattttataattcctttttaataaaatattcagaaaaagcaaaactgtggttgcctgaggctgaagctaggaagattgactacagacaagcatgagggaaattttgggggtgatgagagttttctaaaactggattgtggggttggttgcattactgtataaatttattaaaaatccctgcatcgtataggggcactatattgtatgtagaaagctgtgaaaagattttaaaaatgattgacatgtctgtggttatatcaatgagtactattattattcccattttatacataaagaaaataaaagagaagttaaaaataaaagtttcatggttacatagctactaggtgtaatatccagtattggaatttgaatctttttgacactaagaccttactctcgatcatataatacattcactttctattttaaagttatattatagccgggcacagtggctcacacctgtaatcccagcactttgggaagccgaggcaggcagatcacgaggttgggagatcgagaccatcctggctaacacggtgaaaccccgtctccactaaaaatagaaaaaattagccaggcgtggtggcacgcacctgtatcccagctactagggaggctgaggcaggagaatcgcttgaacccagaaggcagagcttgcagtgagacgagatcgtgccactgcactccagcctgggtgacagagtgagacaccatctcaagaaaaaaaaaattatattataaatgctgcatctcattggtcagaagctctcttgaaattataaaacaaagaagaaaaaagataaagactgggaaattgtgttgaatcagtatataaatcctgtatactggtccttccatttcccctagaaataagtgatacaggccaggcgctgtggctcacacctgtaatcccagcactttgggaggcggaggctggcagatcacctgaggttgggagttcaagatcagcctgaccaacatggagaaacccccgtctctactaaaaatagaaaattagctgggcatggtggcacatgcctgtattcccagctactcgggaggctgaggcaggagaattgcttgaacccaagaggaggaggttgtggtgagccaagattatgccattgcactccagcctggggaacaagagtgaaactcaaaaaaaaaaaaaaaaagaaagaaaaagaaaaagaaagaaggaaggaaggaaggaaagaaagaaagaagtgatacaacaagttacagcatctttgtttattatccactgtgagttgtattaccacactttacttggctctttggcaaactatattatctcttcagatcactagggctaggaaggcccactggtaacttgaaggagtaaatgtatcttctaaaaaatgcttacttccagggagattggatccacacaagtgaatacatatatagtccttagtgtatgctatgattattttactatgtcagtagcataaagattgctatattaataagcattaagtgcctgctgtgctagacagtgaggatgcaagtggccaccaaaatagcatggtccctgccctcctggagcttctttttttcttcttcagtgggggaagcagatactttgcttatgcaaaaataattataaaatttaaagttgtgccaagttcaatggaaaaaatataaggtgttctgagagagcataacaaaggatcctggttttaactggggcctaatggaagacctctattaggaaataacatttaaactaagaccagacagacctgtagaaattagcaaagcaaagggagggaggaaaaagcagctttcctggcaaaggaacaatttgtgtgaaggccctgagacagggaagggctggggttctgaccaccctccaagtggtgcaatggaatatagtgagagagggagaagacatgagaacttggatactatgcaaaggatttggtattttaattcaagagcagtatgatgctactgaggagcagctggacaattgtgtgatccaattaaaattttaggaagatgaacctcgctattgtggagaatgcatacacaagggttctgttggttcatgaagaggtcttaagaaaactatgagctgggtgcagtagctcaggcctgtagtcccatctacttagaagtctgaggcgggaggatcccttgagcccaaggagctggaagttacagtgagctatgattattccactgtactccagcctggatgacagagcgagatcctgcctcagaaacaaaaaccaaaaaacaaacaacaacaaaaacaacaacaacgaaaatctcagaaaactacaggccttattatcaagaaaatgacaggccttattattgagaaaactacttacatttttaaaagctgattttcaaaaaccagattgtgaattaagtgatgctgaataggggaaaaaaagactgataaaccagtgtatctctgaataacccactagatcagtgcttgtcaaactttaatgtgttttcaaatcaccctgatgttttgttaaaatgtaagtcatgtctcagtaggtctagaggagggcatttctgcatttctaacaagctccccggtgatgcctagaccattggtcctcacactttgagtagcaagtgattgggctatactctttattctaaattctaaatgtattctatcttctaatgcctatcagccctcttgctggtctggctaattatcaaacttgagcatttaaaactgggggttttcagagattaattgaagtgttaaagacatggaaatataggtcacatatggcttttcatctcttccggaaatatcctatatatccttacttcttttctacctacctaacctatgtgcctaccccttcacttatgttcaaggttctattatacttcaaaaggactctatgcaatcaaagtgatgtccaagacaaatatacagaaatagtatgaggctctaacactttacatctaatggagtggtttgcatcattaattgaggcttactctgtgccaggcactttacctgccttcttcatttaataggataggagcaggaactcttagaggttcatttcttgttcaaggatatacatctcatctctggcttatatcacagtggactcttttattcactatcctaatcattataattttgtttggtgacaacaattctaaatgcagaaaagttaaggctctttattctgtgactaaaggctttgtattttctaaagatttgtggagctttgctgccattatttcaataattttataaagatcctaggtggtaaataggcctggctttttttctttttgaaatcttctccgtcttcttcttcattagcagtgcaacttcttgtggcatatggtacccaagatcttgggaaaaggattgatcaagtaaagggaaacgatagagagagtgtgctctacaactgagatcatgctccttgtgaaagacagggtagggaaatttcttattgctccctggttcttaagaaatgagagctaacaatgacatccagttttaaaagaaataaaatctgaattgtacttttaaattttataagccagagttaaaccaatagattgtaactcctgctaatttgatagtagctccagataatgaggaagtgacagggaatgctaatttcatttggtaagagataaaactgaaattattaatgtctccacggaaatgctaaatgcctccttacaagtagggtccggctaattgtctgtcttccaacaagccagatttgttggtgtttttccagacaatgttgtgtagttttcggtttggttcgatcccctttcttgtgatcaaagaaagtgattcaaatgtttaatgagtcttgatttggattggagacttgcagaacggctagcctcacagccccaaggctggctttccctaaggtaggtttcctatgcaccgatactggcaaggcgctttggctggaaactctggaaggaagccaaaggaaagtgaagttcctggcgctagcgcgtgtcctgctcagagagcccggcgctagctcattcttcgtgcagttattggctgggactctgtgtgccgctgtcggccaatgaagacgctggagatcgggcccctgcccgtcccctttctgcgccccgggatgaggcagagactgaacagccggcgagcaaatcaacggcatccagaaagccatgtcggactcggcgcccagcgcccaagcgctaacccgctgaaagtttctcagcgaaatctcagggacgatctggaccccgctgagaggaactgcttttgagtgagatggtcccagaggcctggaggagcggactggtaagcaccgggagggtagtgggagttttgcttctgcttggtgccttgaacaaggcttccacggtcattcactatgagatcccggaggaaagagagaagggtttcgctgtgggcaacgtggtcgcgaaccttggtttggatctcggtagcctctcagcccgcaggttccgggtggtgtctggagctagccgaagattctttgaggtgaaccgggagaccggagagatgtttgtgaacgaccgtctggatcgagaggagctgtgtgggacactgccctcttgcactgtaactctggagttggtagtggagaacccgctggagctgttcagcgtggaagtggtgatccaggacatcaacgacaacaatcctgctttccctacccaggaaatgaaattggagattagcgaggccgtggctccggggacgcgctttccgctcgagagcgcgcacgatcccgatgtgggaagcaactctttacaaacctatgagctgagccgaaatgaatactttgcgcttcgcgtgcagacgcgggaggacagcaccaagtacgcggagctggtgttggagcgcgccctggaccgagaacgggagcctagtctccagttagtgctgacggcgttggacggagggaccccagctctctccgccagcctgcctattcacatcaaggtgctggacgcgaatgacaatgcgcctgtcttcaaccagtccttgtaccgggcgcgcgtcctggaggatgcaccctccggcacgcgcgtggtacaagtccttgcaacggatctggatgaaggccccaacggtgaaattatttactccttcggcagccacaaccgcgccggcgtgcggcaactattcgccttagaccttgtaaccgggatgctgacaatcaagggtcggctggacttcgaggacaccaaactccatgagatttacatccaggccaaagacaagggcgccaatcccgaaggagcacattgcaaagtgttggtggaggttgtggatgtgaatgacaacgccccggagatcacagtcacctccgtgtacagcccagtacccgaggatgcccctctggggactgtcatcgctttgctcagtgtgactgacctggatgctggcgagaacgggctggtgacctgcgaagttccaccgggtctccctttcagccttacttcttccctcaagaattacttcactttgaaaaccagtgcagacctggatcgggagactgtgccagaatacaacctcagcatcaccgcccgagacgccggaaccccttccctctcagcccttacaatagtgcgtgttcaagtgtccgacatcaatgacaaccctccacaatcttctcaatcttcctacgacgtttacattgaagaaaacaacctccccggggctccaatactaaacctaagtgtctgggaccccgacgccccgcagaatgctcggctttctttctttctcttggagcaaggagctgaaaccgggctagtgggtcgctatttcacaataaatcgtgacaatggcatagtgtcatccttagtgcccctagactatgaggatcggcgggaatttgaattaacagctcatatcagcgatgggggcaccccggtcctagccaccaacatcagcgtgaacatatttgtcactgatcgcaatgacaatgccccccaggtcctatatcctcggccaggtgggagctcggtggagatgctgcctcgaggtacctcagctggccacctagtgtcacgggtggtaggctgggacgcggatgcagggcacaatgcctggctctcctacagtctcttgggatcccctaaccagagcctttttgccatagggctgcacactggtcaaatcagtactgcccgtccagtccaagacacagattcacccaggcagactctcacggtcttgatcaaagacaatggggagccttcgctctccaccactgctaccctcactgtgtcagtaaccgaggactctcctgaagcccgagccgagttcccctctggctctgccccccgggagcagaaaaaaaatctcaccttttatctacttctttctctaatcctggtttctgtggggtttgtggtcacagtgttcggagtaatcatattcaaagtttacaagtggaagcagtctagagacctataccgagccccggtgagctcactgtaccgaacaccagggccctccttgcacgcggacgccgtgcggggaggcctgatgtcgccgcacctttaccatcaggtgtatctcaccacggactcccgccgcagcgacccgctgctgaagaaacctggtgcagccagtccactggccagccgccagaacacgctgcggagctgtgatccggtgttctataggcaggtgttgggtgcagagagcgcccctcccggacaggtaaggtttagcaagtcatgcttgaccctgttagtgcttttttattcctacatcatattgaggaaggaatggagctgtttttttagtgatgaagatgttttcctggtgatgcattcacactttcaactggcccttcctagatcaaagttagtgcctttgtgagatggtggcctgccagagtgtggtttgtggtcccatttcagggggaagatacttgactcatctgtggacctaattcacatcctcagcactcttttgctatcacaactaaccaatcttgctaagggatggttaagctaaaacacaagatctcagcgatcagagtttagcttggtatcatttacattaggaataagctgctggatacctctaaccagtggcagcttctaggaatacaaaaactacctcattcctccacctttcaagtgattgtgacatttgtattaaaactaatagctttttgataattttcctttgtttatacagatcgtgtacctcattctcagataattttttatgaatgaaatgaaattccaggcatcctttaaattttatttcaagcattctactggaaatgatgtgcaccctgcttacaaaatatttttaccttataacagtaatgcatgtttgctagaaaattcagaaaatacagaaaagtatttaaaaaattaaaactataatctccaaacccaaagataaccatttttaattataaaagtaataatttatttcaaaaataaatctaggcaacccaagaaaacataaagtagccagactcagtggtgtgcacctgtagttcttgctgctcagtgcctgaggtgggaggattgcttgagcccaggagttctgggctgtggtgcactatgctgatcaattgatcaatccactgtctgcactaagttcagcatgaatacagtgacctcttgggagggcaggaccatcaggttgcctaaagaggggtgaactggcccaggttggaagtggagaaggtcaaaactgctgtgctatccagtagtgggatgacatctgtgaatagccactgcactccagcctaggcaatatagggaaaccatgtctctttaacaataacaacaacaacaacaacaatcccagaaactacaaaaggagagtctttttggtgcctccagtgttagtccctgtccttccagccttatttttcttaagtatatgcacaatgtgaaaggtagataaattcatatccttagacaggtaaagcattcattaattcagggtggtatgcaaggatactatccaaggcatggtatccatgcaaggtgactgcaaggcctttgccctggagagaaccctatacatactctcaactgtaggagaaacactgttattttgttactcagtgcatcattgctatcaactcttggatttggcagttagtcaaatgaggttctaccatttaccaactaggagtctgtggccaagttactcaatctcctttctaagcctcttcctcatatgcaaaaagggaataataagtgttttataagattcatgcatgatataatgtatgcaaagtgtttagcatggtgcctggcatatcataactgttaaacaattattagccagctcctagcattttgggaggctgaggcaggcggattgcttgaggccagcagttcaagaccagcctgagcgacatagtgagatcctgtctctacaaaaaaaaaaaaaaatgtgttttcattagctgggtgtgttggcatgcacctgtggtaccagctacttgggaggctgaagtgggagaattgcttgagcctgggaggttgaagctacagtcagctgtgattgcaccactacacttcaaccatggcaatagagtgagaccctgtctcaaaaaaaaaaattatcagctattactataattatttttattagttcctcactcacctaaaatctcaaacacaccttagaaatacacatatgagaacaaccaaaaatgacaaagtagaagcacatatgaaaaggctaagaaagcatgaaagccagcaagaaataactgccgctcttctggtcagcctggaaagcaactggcattttccctagaacaatgttttcaaacttggttgcacattaaaatcacctagagaccttttaaaaattctgaaacccaggccacaccccgacaaatgaaagcacagtctctgggggtgggacataggcatcattttttgaaggtccccacttgatcctaatgtgcagacaaatttgaaaaccacagctttgggaggctgaggtgggtggatcataagatcaggagtttgagaccagcctggccaatatggtgaaaccccgtctctactaaaaatgcaaacattagctgggcatggtggcgcatacctgtagtcccagctactctagaggctgaggcggaagcatcagtgagggagaatcagtgaacccaggatgtggaagtttcagtgagcccagatcacaccactgcactccagcctgggcgacagagcgagactccacctcaaaaacaaaaagaaagaaagaaaaaagaaaagcagtactctggaacctaccaatccatcatttagcatatttgtgaagtaaagtgttattctggtatttgcagaaccagaatccagctttattgggccaggcccaatttttttaaaaaacatggtaaggtctcccagccttaaagtattacatagcatagctctaaaagatcactgtaggaagacataaaatggtatttcagtcatctaagggaaaaaccttcctaaagcactagcccctggacaactattatttaaacatctacagctgttcaatagatattgggttctttttggagggatgtgacaaaattcttgtataattagattgtgatgatgattgtatcagtttagtacatgtaaatacactgaaaaccattggattatacactttaaatatgtgatttgcatggtatgtgaattatgtctcagtaaaaatctagagatggggctgggctcagtggctcacgcctgtaatcccagtacttagggaggctgaggccagcggatcacctgaggccaggagttcaagaccggcctggccaacatggtgaaacttcatctctactaataatacaaaaatcaggccgggcctggtggctcacgcctgtaatcccagcactttgggaggcggaggcgggcggatcacgaggtcaggagtccaagaccagcctggccaacatggtgaaaccccgtctctactaaaaatacaaaaattcaccaggcgtggtggctgaggcaggagaatcgcttgatggtggaggttgcagtgagccgagatcgcgccactgcactccagcctgggtgaaagagcgaaactccatctcaaaaaaaaaaaaaaaaaaaaaatcagccagatgtggtggcaggtgcctgtagtcacagctacttgggaggttgaagcaggagaatcgctttatctcaggaagcagaggttgcagtgagccaagatcatgctgttgcattccagcctgggcaacaagaacaaaactcactccatctcaaaaaaaaaaaaaaaatatctagagatgggagaatcatatggctggcataaaaaggtcaagtcaaagatatgtaagattaaggctttacgatgctccagttctagtaaaacagaccaggtacttgttttggtgtgaaattgccaatataagtatagtactgtacatattagttgtttagcttaggtaagtcttttaatctctttaaactccagtttcctcatctataaaataaagagaatatctactttgcaaacttgttgtgagagtgaaaagtaatgcatataaagtccctgtatggagcaagtactcaataactatttgttgaactaaaaatgataatactgatattcaccatttattagcatccctatgtgccagacactgtaaacaattaaaagttatcattctggtacccagagtacagtatgagacagacatgcaaaaaaaaaaaaaaaaaaagataatggagatctgcatagcataagatgcagtgggaccaaacgggaaaaaacacctaaatgagcctggagaaaggaagaaatgatagaggtggtgatgcttgagctatgatctaaaggttgagtagtagcttgtcagacagtaaaggggaaaggacagggcagggaggggccattgcaagaaattccatgcagagggattatggtatttcattatcactgaaccttaaactgtgtgtgtggccgggtacggtggctcatgcctgtaatcctagcactttgggaggccaaggtgggcagatcacttgaggtcaggagtttgaaaccagcctggccaacatggtgaaacctcatctctattaaaaatacaaaaaattagccaggtgtggttgtgggtgcctgtaattccagctacttgagcagctacttgagaggtcgaggcaggagaattgcttgaacccgggaggcagaggttgcaatgagctggtgtcaggccactgcactccagcatgggcaacagagagagactccatctcaaaaaaaaagtgtgcgtgtaaaacagacagtctttgtaggagatgaggtgaagcaagtaggcaggagttagatcctgagttacctttgggccaagccaaggagtttttattttattccatatagatgacagtcactgcagaaatttgaactgatatgcatatatcatgaggtttttttgttttagaaatattattctgtcagtcataagtgaagggactggggacattgggactggaggcaaagagatcttatctctttgcaatagtttgaaagctattgcaatatttgaagagaagattgataaatgcttgaaccagcacagtggcagtacagatggagggagctgactacaataaaatcatcaggacttgttgattgacatgatataggaagtgagggacagggatgagtcaaggctgatccccctagatcctgactaaggaagctgggtggttgacagtgccattcacagagacagtgaattctggcataaacacctaataggtcaggctggtttacacctccatcattcccatgggagaaggtatagaggggtgtgtgtttgtgtgtgtgtgtgtgtgtgtaaaagaacacagaaagccagattcctctttttgacaccagaatattggttcccaccatagtcaaaaggatattcctgaggatcgaggcttggaaaaatattggggaaggataagaactccagttgttgctgctttttttggcagccagtgtaacctaggtaaggacttggttgaattaagaaatttcatgtccagatcaggatggatttttctatttctctgagctctggtgtgtttcccactcagattgcaggtcgtaggtacctacggtgtgaattgtgttgtgtttctgtgcttgtgcaagggagtagctaggttgctgggaggtctggatgagggtgggggtggggtgagatcaagtctccagctccaagaggtcccctggggctaagtgaaaagcttgctcttttgaaatggtcttcgttggtaattaacaaaagatcaagaataccttggtgtcagataaagggaatttgtaggcacaatgctgttggtagctgatctcaatcattcaaggaagctattaaatctatgaacattagcattctgccaggtaaagagatctggtccttagcacctcccagacacactgattctttactgttttgaaacatctccctctcctggcttcctccaccccgcttccatactgtccttgaaatcaatgaatggtaatttagtgtatctagtgtatcactagcaaatgtctgaataagaaaggtttggtttccgctgtgtctcctgttacaatgagaacatgtactgcataaatttaattggctacgttaatgtgtaagccttttctgcaaagagatggatccgtttctgaatattctgcagaagggcagagttttgagtatatggcagtggttctaattagcagttgctccaatacaatcagactgagacggaagctactcatttagaatactggttgatgacaacactggcttgaacaaagtgaccactctccaatggctactctccctctcagtgggccgcaggttgctagggctcaggctgtggctgttttccccgccgaaaaggggcggggtcagtcggtgtgttaggaaaaaaaatgtatatatatatatatgttgtctgcctccccacagagataacaacccgtggaaaaacatgccgttgagcgggaggaaggcgaaaagataggctgggttttttggggggtgggggagcgtggaggatagggtgggctttttcccctccaatgctgcgacgcattaaccctgctgctgttgggacgttctctgctcagcctattggctgagcccgggagccgctgtctgccaatcgggtggtgaaaggcagacaaatctaccccgccaccagcaaaaacggcgcgtaacccttgcggcgccggccgaaccgcgccagagctggcgcggggaaagggagataggtgtctccagctgctgtggctgtttggggcgggtcggcttcatccgcgtctcaggagcaagtagagaattagcgggcggcagcaatgctccgcaaggtgagaagctggacagaaatctggcggtgggctacccttttgttcctcttttaccacctgggttacgtttgtgggcagatccgctacccggtcccagaggagtcacaggaagggacttttgtagggaatgtcgctcaagatttcctgctggatacggacagtctgtcagctcgcaggctgcaggtcgctggagaggtgaaccaaagacacttccgtgtggatttggacagcggagccctgctcatcaagaacccaatcgaccgagaggcactgtgtgggctcagtgccagctgcatcgtgcccctggagtttgtcaccgaaggtcctttggaaatgtaccgagcagaggtagagatcgtagatgtgaatgatcacgccccccgttttccgcggcagcagctggacttggaaattggggaggcagctcctccaggacagcgtttcccgttggaaaaggctcaggatgcagatgtggggagcaattcgattagcagctataggctgagctccaatgaacactttgcactggatgtgaagaagcgcagcgacggcagcctggtcccagagctgctcctggagaagcctttggatcgagagaagcaatcggactaccgcctggtgctgactgctgtcgatggagggaacccgccgagatctggcaccgcagagctccgggtatccgtgctggacgtaaacgacaacgccccagccttccagcaatccagctacaggattagtgtgttggagagcgcaccagcgggcatggtgctcatccagctcaatgcctcagacccggacctgggtcccagtggtaacgtcaccttttatttcagtggtcatacccctgatcgtgtaagaaacctctttagcctgcaccccactactggaaagcttactcttttggggcccctagactttgagagtgagaattactatgaatttgatgtgcgggctcgcgatgggggttctccagccatggagcaacattgcagccttcgagtggatctgctggacgtaaatgacaatgccccttacatcacagtgacctcagagcttggaaccctccccgagagtgcagaacctggcactgtggtggcacttatcagtgtgcaggatccagactcagggtcaaacggagatgtgagcctccgcattcctgaccacttgccatttgccctcaagtctgccttcaggaaccagttctccctggtgactgctggacccttggatcgagaggccaaatctagctatgacatcatggtcactgcttctgatgctgggaaccctcctctcagtacccacagaactattttcctcaatatttcagatgtgaatgataatccaccctctttctttcagaggtcacatgaggtgtttgttcctgagaacaatcgcccaggggacctgctttgctcccttgcagcctctgacccagactctggcttgaatgcgcttatctcctactcactcctggagcccaggaatcgagatgtatcagcttcctctttcatctctctgaacccccagacaggagctgttcatgctactcgatcctttgactatgagcaaacccagacactgcagtttgaggtgcaggcccgggatcggggcaacccaccccttagcagcactgtaacagttcgtctatttgtgctggacctcaatgacaatgctccagctgtgctccgtcctcgggcccggcctggttccttatgtccccaagcactgcctccatcagttggtgctggccacctaatcacaaaggtgactgctgtggacttggattcaggttacaatgcttgggtttcctatcagctcctggaggccccagatcccagcctgtttgcagtctctcgatatgctggggaggtgcggacggctgttcctatcccagctgacctcccaccacagaagctggtcattgtggtaaaggatagtggtagtccaccactctctacctctgttactctcttagtgtccttagaggaagacactcatccagttgtcccagatcttcgagaatcttcagctccaagggaaggagaatctcgtctaaccctctacttggctgtgtccctagtggcaatttgctttgtctcctttggctcattcgtggcactactctctaagtgtcttcgtggggcagcctgtggagtcacatgctttcctgctggcacctgtgcctgtctcaccagatctcgaaggagggaggggcttcccccttccaatgggatcctccgaatccagctagggtcagatgaccctatcaagtttgttgatgtgggaggccactctcatggctgtacacccttggcttctgcacccactcggagtgatagcttcatgatggtgaagtcacccagtgcacctatggcaggggagcctgttcgcccaagctgcccaccctctgatcttctctatgggctagaggtgagacctttgcaggctcaacaaatgcttgagggttattctgatccaggcatatggctaggccatgtcctagagagtactggcctctcagtaagtgcccatagtgatgtcaccatttttgtaagaggtaactatgtggtagacgctgtgctttgtaactgtttcgtgaattaaccagagttgtcacagtttagcattgggggcgggtcatgcctatatctgagtaagaaatgaaagtaattggtgatcaagagccaggctgttgtggaagcatgatgatggaatgtgggagcacaggaggctacagtgcacagggtacagtgcaccaggcagtcacttggacaaaggtggctgttttctctactcttcctgaaagaggggatcagattctgaagtaccttaactctaggttaccatttcccaagggattgaggggaaataaaatctttgtctcccagtatctagtacactgtgaagggacctctctatttgaaacatagagacagcagaaagaggagagaactaaaggaatagagaggcacgcatcagagtggtggcatagatcttttggtctgggtcttaggactcatatcaagtccctactggggatttgaactagatgcggtaaattggaaggttggggcgggttggtcatcacctttggaaaaaacagtaagtgaaatcacttatgtcagaaaactggtttacagttggctgattcatagaaacagccaccctgtgcatctttaagttgagttctcctgaatttggtgaaaccatgaaacctagaagccaagccatccatgcttggcctctgaccaccctcctgggtgacctgattcagccccagaaatgttcccctacccaaaaactgtaacactcattccacatttggggtctggggtgtcagaaaagctaagtcccatgtcagctgacattgagatttccgcaaagcattgctggagagtcagggcaagactttacaaggttcttactaatcttttctctcaccttagcagcattcagcaggatgggggagggtgggggaatacatgggctttgcctctcccagaaggacaagattttgctggttcaagcaaagtggtggaagcttctgaagtcatgcaggaagttgctgggacagaacgctgaggagttttgtatcactttgtcttccctgttgagtaccatctgagctgtcaaactttgctgccaagggggctgaatcaacctgcagcacgaagtgagtggggaggtaggaagcttctgtgacacagatttgcagcctgtgttcccaaggtttccaggattgaggaaactccataattggttgagagcacacagactttttggccaatcagactcagagctgaggtgggagatctgctcttccagcccgcctctcctcctccagctccccagctccactcaaattcagctcccctcccccctgcccacccccgccactcggtgactaagaactgctgcaagcaggcaaacctccgagcagtttttaagaggctggaaggagacataagagacttcagctgctgcattccaagccctgggtctaccttggagacaggacagcacagacttactctccacaaagggacttctgggtcatggggcccaagacactcccacagctcgctgggaaatggcaagtgctgtgcatgttgtccttgtgctgctggggctgggtgtctgggcagcttcgttactcagtggtggaggagtctgagccggggacgctggtggggaatgttgctcaggatctgggcttaaagatgacagatctgttgagccggcggctgcaattgggctctgaggagaatgggcgctatttttccctgagcttgatgagtggtgccctggcagtgaatcaaaagattgaccgagaaagcctatgtggagccagcaccagctgcctgctgccagtgcaggtggtgactgaacaccccctggagctaatccgtgtagaggtagagatcctggatctcaatgacaactctcctagctttgccacccctgagcgagagatgcgcatctcagaatcagcagcatctggggcacgattcccactggacagtgcccaggatccggatgtgggcaccaatactgtgagcttttacactctaagccccaacagccacttctctctgaatgtgaagaccctaaaagatgggaagccattcccagagctggtgctagagcagcagctggatcgtgaagcccaggcaagacatcagctggtgcttactgctgtggatggggggaccccagcccgctcagggaccacccttatctctgtcatcgtgctggacatcaatgataatgctccaaccttccaatcctcagttctacgtgtgggaatcccagagaatgcacccattggtactctgctgctccgcctcaatgccactgatccagacgagggcaccaacggccaactagactattcttttggagaccacacatctgaggcagtgcggaacctctttggcctagaccctagcagtggggcaatccatgtgttgggtcccatagactttgaggagtcacgtttctatgaaattcatgcaagagcccgtgaccagggacagcctgccatggagggccactgtgtgattcaagtggatgtgggggatgtcaatgacaatgccccagaggtgctattggcctctttggccaaccctgtcctagagagcacaccagtgggcacagtagtggggttgtttaatgtgcgagaccgggactcaggtagaaatggtgaagtgagccttgatatctctccggacctgccatttcagattaagccttctgagaaccactactcgctgctaaccagccagcctttggaccgggaggccacatcccactatatcatcgagctgctggccagcgatgctggttcaccttccctacacaaacatctcaccatcaggctcaacatttcagatgtcaatgacaatgcaccccgcttcaaccagcagctttacactgcttacatcctagaaaaccggcctccgggctcccttctttgcactgtggctgcctcagatccagacactggggataatgcccgcctcacctactccattgtaggaaatcaggttcagggagccccagcctcctcctttgtgtatgtcaacccagaggatggacggatctttgcccagcgtacctttgactatgaattgctgcagatgctgcagattgtggtgggggttcgagactccggctctcccccattgcatgccaacacatctctgcatgtgtttgtcctagacgagaatgataatgccccagctgtgctgcacccacggccagactgggaacactcagccccccagcgtctccctcgctctgctcctcctggctccttggtcaccaaggtgacagccgtggatgctgatgcaggccacaatgcgtggctctcctactcactgttgccacagtccacagccccaggactgttcctcgtgtctacacacactggtgaggtgcgcacagcccgggccttactggaggatgactctgacacccagcaggtggtggtcctggtgagggacaatggtgacccttcactctcctccacagccacagtgctgctggttctggaggatgaggaccctgaggaaatgcccaaatccagtgacttcctcatacaccctcctgagcgttcagaccttaccctttacctcattgtggctctagcgaccgtcagtctcttatccctagtcaccttcacctttctgtcagcgaagtgccttcagggaaacgcagacggggacgggggtggagggcagtgctgcaggcgccaggactcaccctccccggacttctataagcagtccagccccaacctgcaggtgagctcggacggcacgctcaagtacatggaggtgacgctgcggcccacagactcgcagagccactgctacaggacgtgcttttcaccggcctcggacggcagtgacttcacttttctaagacccctcagcgttcagcagcccacagctctggcgctggagcctgacgccatccggtcccgctctaatacgctgcgggagcggagccaggtgaggggctcggcgccgccccgggcgacccctgggggcggcactggagaagccgcccgtcctcataagggattgaacttgcatccactcctctccggccggcttggtcgctggctgcgctccacccgattctcgggatcattggaccgtttgcgcgaaaccagagtggccgattaagggatggggctccgagcaccgggggtggtggcgactgtgggcgaggggaggtgggaccgacccccacccctacactcaaaaaaggccggggcctccttcgagcttccggtgaatttcgggcgatttccgcgggtgtcgggggtcccgggaggaggcagtcacagatccacccctgcagccagcctcctaggcgccggctccggcacgcttcgccggtctgtagatttcctcttcgatttctccccagctcccagcatctgtgacttcactgttaccctccctatccccgcatcacccaaccgcacctgtctgcgggacttaggtgtgcgcgcggggctcatgcgtgtcctccctgctggccacccccacggcccacacaagttgcacgggctcgccacgccccgccaacacgtgcgcggacgcacgcacgcactcctcgcacgtgggcttacgcgaataccagctttcactgccactcgctcgcggccagattcacaggcctgttccggtccactcgcagctcccctctgccgctccctccgccgggctcaggagtactcgtagctgattgtgcgcgcctgagggtcccagatcgcggccgcccaggaccaggcgaggactccggagcctcctctcacctctcccacctgcgccccgggctgggccgggtcgcctggggggcggcctgagcgaggcgcggggccaggagcgctggagcgactgccgctctaagtgccgggcgggcaggactctacgatccttgggccagaggtccggatggtcccgggactccgtctcaagggtcggcgacccctcaacccagaagcctcgagcaggcggacaggcagagctgcccagtggccgaggcgcggcagggctccgcgttgggcgagtgagtgagcctctataggacagcaggactgggactccagtggcaccagcggccccttcctcccgcaggaagtgaaagcctcgagcgccctggctctcaacccccagagatacaggcttttggcgccgtcgtgatcacaatgtgcccagcgatctagggtcagagatttggaggtgaccaaactatctgacactctaacaagtcctgtctcctctggcagatggaaagctataggctctgccagatgccagggtgcccttatgtgtgaggaaactacaatagtaaaaaacacaagtttctccaactccaggagcttttattcaaaatatatcaatgcctaactctgctcctaggactgtattttgaaacacccccaggtgattttgatagctgattgagagaaacttactatataactcctttgagaacctcatctcatttgctcttcccaccattgctgttggctaggtactaacatgcctctcttataacagcttcacagaggtcaagtgacttgctcaagttcacagagcaagtaagagagattctaacccctgtctaactccagaatgtgtgcttttaatttcttggcacttggaactttaaaagcttgaggacaggagaggggagttgcctctgctgggattttgcttctgctgggatggggcaagggtggggttccttcccttttaggaccttacatgtggggaaagtcttctgtggctcctcatttctgagcagtccccgcagcgcaaacttggccagttatccttttggagattgagttcccccagctccgtttcctcctatcacaatcactgcatttccatgtagattctgctgtgtctaagaatacagtggctgagggctggccatccctgtgcccttctccatggcagccccagaatggtgctggtgactcccgatacacctggaatgctaggtttctgggttctgctcatatcactgccacctgtgagccttgagtgagccactggcagttccggagcttccttctccctggagtaatctgagatactcacactctctgcttctgggagcaagtatgagtattaattaccagcccaccccagaaccagtgaggaggtggctctaggagtgctccatgagagtgtgtgatgggataacacaccccctggaaagaccagaagggactcaggaatgaagtggctggccagagccccacaccttcagctaggtgggagatggctacacatcagccccttgggagccctggagacttagttggccctgcttggaggctgtgggagctggatccctccccgctgcatcccttccatttttctccgtctcagacagagcagccttgttctcttctccttagtcacagaccattgtctggcacggagttctaggggtgagaagtgtcccgggacttggatgccccgcaaaggcccaatctggcatgactcctaaattaataatgtatttagctgtgggaagagattcttgcaagccaagggcccagagaagatgtccctgtgaatgtgtcactgcacaacctggcaccaaaagggttaccaagaacagcagccatcttgctgcagaggatgctttgttcccagctgaggagttgaataaattcattctagggctggtagaattctcattgaaaagcctcctttgccactttagggggctttgtctgcacctcttcccccagttccacagaagatgccttcagtccttgaattttggctcaggagttctgactctgggggcagggaggaaggggccatttctttaggaaaggagtctcagcttgctcactgtggtcagatgaaatgtgatttatctcttggtttctggtacctcagacctctgagacctgaggtgtattttgtctttggagatgagtccacccctgccccctcttagtccgttttcttctctgtgcccactcccctccttctctcccggcccatccctaggggctcgggtgacattctaacttctcacgggtactcagcccctttccctctgttttctccacagcaagccccgcccaacacggactggcgtttctctcaggcccagagacccggcaccagcgggtaggtgactgattctccagcccaccctcttctctgcggcattttctcagggatgacgtgggaggagatgggggagggcccagcatttgctacagatggcttctccctcagtttgagatcccagggaggtcttggtgtgcggggggctggcacacagaccccggaaggaagaggcgactgccctgactgttcaggaagctcaattcacatgcttgccccttccctcctcgccacgaccggcaccttttcctatcccctgagggcactgtggaaccaaaggatggtcttaagctggtctctgggtgaaagcgaggctttctatgcccatgtactgcctaaccccctcccctgagttgagctgggctccattatgacctggggctcaggcagaaaagcatttgaccggaggaggcggtccgcactcagcgcctcctccagagcctccagagccgaggctgactgcagcctggggagagtggaggcagcacagctggaggtggaactgaggaaggactgggcggggcatggagcaggcccccttctccggcccctcctcccactgtcctctgcccctacttgtcctgctctctgtctgtggggtctccgtgtctctgcccctttttcttgagtttccgtctttgccactttctcttacctctcagtccttccctcagtctctatctcgctttgcaatctctgcctctccctctcttctccatctctgtcttagcttccgtcttgattgctgcacctcagcctcagtccctttcatttgtctacttgcattgatctgtgccgcccactgtgcctgccatggcataagtgctcaataaatgtggagtgagtaactacacgggacccttagtctctttctccttctctatctctgcctccctgtccttgtcctggacctcttttctgtttctcctttcaccgtttcctagcgccttgtgttcttctatccccagcctctatgtttctctgtctctcactatttctgctttcctctctgttctttgtctctctttgtctctgtctctgtatatctttctttgtctctgtctctggtctctgtgcctgttgtctttttctgcctctttctctgttactctttctttatctctctttttcttttatcttgtcttttttctctgagcctctgtctctgtctctcatttttttgtgcttgtgggcaagccagcacacacaaccccccacccaccacccaccaacaccccgctctcttccttccctgcccctcacacactgagcctttgatcgcagctctccaccagacaccctcccatccaagcagccccagctgctcatttcaatctggtatgaattcctgctgagacaggaaccccctgcgggctgaaggggagggaaacttcagcagaaagaccttcagttggtctgagcagagtgggataggctctgcgccaggcctcccagttagaagtcaggagcctggaggagtctcagagcccagggagagaagcaggagcttgggccaccttaccctacctcctcaatggttgagtacttgctgtccacatttgccaagttgctacagatgctgagcttccaagagttatctttcccccatcctgcaaccaaccaaacccttgttgccacaaggacccaggagcccttggtgtatggcagagattccagcttctgggcatgcacagtcctgtcacccattttaggaacgcaaagcgcttcttagaaggcccctaaaaagcagcagatcaaaaggcttgggctgcccttgcccttcctttgaccccagctgttgtccttctccctgctggccttgccaaccttctcataagttatccattaagtcattaatgtattcattcgttcatttattcaacaaatatttatcgagcatctactatgagcagggccctgtgctaaacattgggctataggagtgaacaagtagatgtgatcccagaactcataggcttccagaccagcagaggagactgaaaatttgcaacaagtaacacttaaaaaaaaaaaaaaaggctgggcactgtggttcacgcctgtaatcccagcactttgggaggccaaggtgggtagatcacttgaggtcaggggtttgagaccagcctggcagccaacatggtgaaaccccatctcgattaaaaatacaaaaattagccaggcgtggtggcaggcacctgtaatcccagcgacttaggaggctgaggcagaactgcttgaacccggaaggcagaggttgcagtgagctgagatcacgaaaaaaaaataatctagccacaaatcacagtaagttctgagaggcagagaacaatgtgagtgtaatgggggggggaagatcagagaaggcttctaggaggaggtgacattgagaagttctaggccatttatgttccctctacctaccaccaccccaggccatacactggctttgaagcagaattcaccattgaacctggaagccccaccaactgcctctcatgtgtcctctggggtgagcaccttacccctgcctcaactcccattccatcaaatgagaggcttagtggcctggaatacatgtgggagctcttggagatatggaggagaaggtgcggaacctctctctctctcctctctctgcttccttagttaacttgtggaggatgcaacaaaccttttttttttttttttttagacagagtcttgctctgttgcccaagctggagtgcagtggtgcgatcttggctcactgcaacctctgcctgccaggttcaagcgattctcctgcctcagcctcccgagtagctgggacagcaggtgtgcaccaccacacccagctcatttttgtatttttagtagagatgggtttcgccacgttggccaggctggtttcaaactccccgacctcaactgatccacctgcttcagcttcccaaagtgctagaattacaggtgtgatcgcccccggccacaacaaacatttttgattcagcggctccaaagtgaaataagcgttaggatctagtccagtaacttcaacttctctccttcattcattcaacaaatggtcagtgagcactttctgttggccaggcagtgttctcgatgtgggaggcccctgccctcaaggagtttacagtgcactgaaggagacaaatattgaccaaataattacaaaaataaatgtgagactgaaactgtcataagtgctaggtagaattgtatctggtggtgtgggcgtataatagggatttgatttagggagcaggaggacatcctggaaatgaagttgtgctgagatctgaaagacaaatacaaattaaccagctaaagaaaagaaggaagagcattccagatggtcaggcataccagcttcaaagcagggctggtgttgagttcttcagtaaacttggttcaagatcaagccagctctgggtcacactgcctacacagaaggaagagcattccaaatgggaaaagcctatgcaaaagccttgtggtgaggcctcctgggatcaagggaatggcagggagttttctctttgctggcactggagtgaggggatgaagaggagaggttccttttatccagtctaaccctggttccagccttctgttgatgccctgcctcactccctccccaccatcttgcccactgccctccagcctggtctggtcagacacaccagcttcaaagcagggctagtattgagttcttcagtaaacttggttcaagttcaagtcagcactgggtcacactgcctagacagaaggaagaagacctggccaggtgtggtggctcacgcctgtaatcccagcactttgggaggctgaggtgggtggatcacctgaggtcaggagtttgagaccagcctggccaacatgatgaaaccccatctctagtaaaaatacaaaatattagccaggtgtggtggtgcacacctgtagtcccagctactcaggaggctgaggcaggggaatcgcttgaacccaggaggcggaggttgcagtgagctgagatcacaccactgcactccagtctgggtgacagagcgagactccatcaggaaagaaagaaagaaaaagagagagagggagggagggagggaaggaaggaaggaaggaaggaaggaaggaaggaaggaaggaaggaaggaaggaagaaaagaaagaaaaagggagaaaaaatgaagaagacttacattctgaagttcctgcttggcacatgcttctcctccccaccactatcccttctcaggtcatcctttgggtgtctgatcccaatagctgttgtctcaagctctgagcccagcaaaccatttcccccttcttaggctgtaacccaggccctgccctgcagctgtccccagcctctgcacaaagagtctccatttggtccctagactgttctctgatggctccacactaccatccctcctctgagagacagtatccctgctctctctcagtttgggcagtcattcaacaaacaaatagcaacttaatttttttccacttataaaatagtacatgctcattatagaaacatgaaaaatagaaaaaaaattaaaaggaaaaccacccatcattttacaatctagggagaaccaccaccaactacagtttaatatgaaacatttcaaatatgtacaaaagtagagagaatggtgtcatgaacctgtatgataccactatccagcttcaactaatgccttatcttgtttcacctatatccctacccttatcctgtccttggattcttttgaagcaaatctcagacatcatataatttcatcttggtctccaccatctttaacagatgacttttttttttttttttttttttggagacagagtctcactctcttgcccaggctgtggcacaatctcagctcactgcagccttcgcctcccgggttcaagcaattctcatgcttcagcctcctaagtagctaggattacaggtgtgcaccaccacacacagctaatattttgtattttcagtacaaacagggtttcgccatgttggccaggctggtcttgaactcctggcctcaagtgatccaccctcctcggcctcccaaaatgttgggattacaggtgtgagccaccttgcccggccagatgattctttcataaggtccacattttatatttgagtgagtgtctcttaagtatcttaatgctcttttaatgtaaaagacttcccctccatcttccatttttgcaatttatttgttgaatccctgccttttcatatatatctttctaaacttttctttgtgtaatcaaagaacatgcatgagcttcatttttatttttatttatttatttatttatttatttatttatttatttattgatacgtagccttgctctgtcacccaggctggactgcagtggcgcaatctcggctcactgcaagctccgcctcccaggttcacgccatgctcctgcctcagcctccagaatagctgggactacaggcgcccactaccacgcccggctaattattttgtatttttagtagagacggggtttcaccgtgttagccaggatggtctcgatctcctgacctcgtgatccgcccgcctcggcctcccaaagtgctgggattacaggcgtgagccaccgcgcctggccgagcttcattttaaaaaaatctcattcacctaaataagttgttcacaaacttgtcacactttcatgtgacactttattcacatattaagaactgttattcccagtcatacggtacatttcctactagttttttaaaaatagcaactgaggccatactgtccaacagaattatagcttttttcttctttgcagtgtatcatgagaatttccccatgtctttcaaaattcttcccaagtcatttgcagagtaactcctcttatgaatatacatattattttacagaataagtcctcatatgaatatacatattatttttctaatgctaatgggcttttgctacattagaaaacatacacattcatttacaattttttttttttgagacagtctcgctctgtctccaggctggggtgcagtggcgccatctcggctcactgcaagctccacctcctgggttcaagcaattctcctgcctcagcctcctgagtagctgggactacaggcacgcgccaccacgcccagctaatttttgtatttttagtagagacggggtttcaccatgttgaccaggatggtctcaatctcttgacctcgtgatccgcctgcctcagcctccctaagtgctgggattacaggtgggagccaccatccccagcctcatttacattttaacacaattaaattcagggtgttgtcagggtgacttcctagatttctcagttttttgagcatgatgtagggagtattttattatagtccagtctatgggatattcccttatacacacacacacacacacacacacacacacacacacacacacaccccaaactcaatagggcaagaaccatattcatcatctcttaaatcctaggtcctgtcacaggccactgcttggaaaatagttgactaaatgtagtccatttcttccatttttacttttcactattccccaaatcctggaagagtccctcatatctgctgctggggctccaaggcctccaagctgaagcccagtacgttgttgtgcataagatcataggccctggaatcatattaggctggctttcaggttgcaactctaccagttccagctgtgtgactctggtatagtctctcaacctctctgagccctgttttcatctgttggaaaatatagataatcacaacacttatctgcagggtgattccgaggataaaaaagacaaatatattacccagtcagcttagaataggaagctctcagtaaatggttaaaaaagaggtctctctccctctgctcatctcttacccagcttcacataattggcagcccacccacctgtttggccctcaaccttcaaccatttcccaggacgcctccttacactcctgatcatcatggttccaaccccactgttccactcagctttgttccctcaacaccactgctccctgtgacaggtcatcctcctaacctctggcatctggtcccgttgtctccctgacaacccgcatgctctcctccctgcaacccccgccgcttgcctgctctccctactttattcccattagcccccttcacctggggctgagaacacctggccttgaccctgcaccctcagccaggcccacagagctcagtcgggccggaagtaaggaccccagatattcagttgaggaatttaacattaatacaataatatagaatccaccagcagattttcataaatgttctgtgtgttcttttatccttttttttaatccaggattttatcaaggagcatagattgcatttggttgtcacgtctttcctctcctttaatctggagccagctcccagtctttttatttttttaatgacatggatatttttaaagagtccaggccagttgtactttaaaatgtccccgaacctggatttgctggctattctctgatggttagattcagattacacaccttggtaggaatacttcccgcagcatcacactgggactcatctaacgtcggcctgtcccactatcagtgatgccgagtttgttcgtgtggtaaaaacagtgtcccagatctctccattataaaaatatatttttataaagatattttaaaatatttgtgaaaatataagtaatctgtggatgatactttgagataggcagcaacccttcatgcaattttagtattccctgatgatccttgcctgtatctgtttttacatcagtgattacaaagcggtgatgttctgtcattccttctacatgtatttgctggtattcttctgaaaattacctggatgatttcttcagatttaaattcactgtcttttccttggggaagcctggactggctgagctgcctaaccctgactctctgtcttttttttttttttgacagggagtctagctctgttgccaggctggagtgcagtggcaaccttcacctcctgggttcaagcgattctcctgcctcagcctcccaagtagctgggattacaggcgtgtgccaccatgcccggttaattttttttttttaatatctattttagttgagacagggtttcaccatgttggtcagaatggtctcgatctcctgacctcgtggtctgcccgcccctgcctctcttcataccctctggtagcccctgacacagcccatggcaagtatcacaattgcaattactctattgtgtaattatttaaaatcagcctctcagtgcccaccatgagcaccgtaaagatggacagtttctatcatactcacagccacaaccccagcacctggctctgtgtctggtacatagaaattgctcaagaaagaattgttggaggggcgcggtggctcacgcctgtaattccagcactttgggaagcggaggcaggtggatcatgaggtcaggagttcgaaaccaacctggccaatatggtgaaaccccatctctactaaaaatacaaaaattcgctgggcatggtggcatgtgtgcacttgtcgtcccagctgctcaagaggctgaggcaggagaatcacttgaacctgggaggcagaggttgcagtgagccgagatcgcgccactgtactccagcctgggtgacagagcgagactccagctcaaaaaaaaaaaaaaaagaaaaaagaaaagaaataattattgaatcaatggaaacagaattacaactcttcccacttttgggaaggagaattgagattcctgctttccccttcaaccctagctttatgtttgttgtgatggtatagaggtcacacatggcagccttgtgtctgttcttaggctgagttcatctacttagggacggggaatcccagattgggcaaaaccaaaagcagggacagaccttggaaaaattgtaaagcagttcttggttgtgctcacccaccatgacaaaatatgcacacacacaacgcaacacacacacagacattttcatgccttcaaggcctaccctacagcctttcccatggtgccaaacccttcttcttaccttacagtcacttaactgtctctgctggtctcttcccactcatttaggcaacaaatatttattgaaaaacttctctgagccagatggtgccaaacagttacctaaagggcagactgtgtgtgtgccagggctgtttcccgccaacactcccctgcaaattgaaataatttcatccttggaaattcaaaaaaatcatgaaaattgtcactgtgggaaaattccaagtagagctgaaccttctaagaagcagagagttcttcttatggtttagtatttttttaaattatgaatcatttcatgttttttcaacactcggagtttctaaaagtctcacttaggtccaagtgctaggctttgtgctaggtgcttcagtaggaagcaggtggagtcgctgcctcacagaagccagtgtggtggaggaacagacaggcactacaacagctgcagtgtgactagtgccatgtggggcagccgctgggatgggagtacagtggaggcacctgcccagtctgagtggatctcctctgatatattttattcgtgtcatcatggcaaatgttgggggactggcattctagggaacaccatctgcccaggattcacagcaagagggaacttgagggataggaaagtgcaccttggaaaaggtttgatgatagagtgtttgagggcggggggtgggggttcttgtaaaataggaggggcaggttcttctatggccgtggattttactctgagggcttaggaagccattgaattttagaaatttcttctccctgctccagggtctcttggggcctcctacatctccccctaggtacctcctaggtccccactttttctctagctctggaacattctcttccatttcccaccttcacagtcctctggagaaggtctgatctccctcactatgacaggaagccaggctctctcatggtgggtgggggaatgcactatgttcaatgcattggaccagcctggccaacatggtgaaaccccgtctgtactaaaaatacaaaaattagcctggcacagtggcaggtgcctgtcatcccagctacttgggagactgaggcaggagaatcgcttgaacccaggaggtggatgttgcaatgagccaagatcgcgccactgcactccagcctggatgacagagtaagaccctgtctaaaacaaaaagaaaaaagcatcggaggcagcaaagagctggtttgagggactgacttgtgggattctggcttctgaaggattgtagaagtgcctcctaccttgctgagagaaacaggtcttgggcatggggtagggttagggtactaggtttgggagccctgggagaggacaggaggggcatgagctgtgccggcctgggagtctgtgctcaccatcctactctctccccagctcccaaaatggcgatgacaccggcacctggcccaacaaccagtttgacacagagatgctgcaagccatgatcttggcgtccgccagtggtaagtggtgtcagtgtgtgtatggaagagtgggagacctggggttctggggtgcatctcacagccaccatgcccacggactggatgtcaaacctgtgtagtttctccagatctttcggcaggtctgaaaggacccacaattccaaacataaagcctggaattgtggctaaggaacagcagaggggttgggggtcctgggatgcctggaggagagcgaacaaggaaaagactcatggagggaatagtggttacaagtctagctctggaatgggacagtgtagctcaggtcctagctctgctactatccttgggacttggatcgacttgctcaatctctctaaacctcagtttcctcagcctagaaagtggggacagggaccccaaagggttgttgtagagattaaatgagatgataccacaaagcatagagttctgggcctggcgcttggaagccctcaagcaatgaaagtgggtgtagaaatccccagccgagagaacacctcctctttatgcgaggctcctcttttgctgcccctaactccagagtaggattctggttttcccataaggttgactaagggcttcctttgtaatagagattcggctagtggtggttgtccctgaagagtcactagggcccagagcaggagaagaagaatatcatttgtccttaagagcacagcctaagctgggcgtggtggctcacgcctgtaatcccagcactttgggaagctgaggcaggaggatcatgaggtcaggagttcgaaaccggcctggccaacatagtgaaaccctgtctctactaaaaatacaaaaattagctgggcatggtggtgcgtgcctgtagtcccagctacttgggaggctgaggcaggagaatcgcttgaacctgggaggtggctgtggtgagcagaaaatcgcaccactgcactccagcctgggcaacagtctcgctctgtctcaaaaaaaaaaaaaaaaaaaaagagcacaggctttagaggcaggccaatctggattcaaatcctggcacctggcaccaccacttagcaatgagtccttaggtaagttattaaaccccctcggtttcacttactattaatgggcacagtattaacggatctcattgtggtgttaccagggccaaatgcaagtccctcagcacaggattggcagagagtaagggcacaatatattattatctttgctgacccaaacccgttttttactgggtagaaagcagaattagaataatgcctattaataaagactagcttctggagcagcaaatcctgggcttataaggaggctggcagaggatcaaggcattgccctatatcatgaactgatagccctgccctccagcatgtctggaggactggtgggtagagaaccaggtgaaatcacaagaagcactgtcatcacacctgggcacatactaaacaaactttaggggcctcctgtcaatgaatcctctcaatagctctgcaaggcaggtctgatttctcacactcgacagatgagagaaccgagaaggcacttgccccagggtcctcagttttgagctgccaagctgaggttctaacctggctcaactcctaagtttatgctctttctactatagggaccatggctgcctttggatccagcctcggcttctctattacctgagcaggatgagaggctgtcctcttcctcgagctctgctttattcttccagatcagggttgccagataaaatacaggatgcccagttacagttgaatgtcagataaacagcaagtactatttcagcataagtcagtctcaaatgttgcatgagacataatgtactaaaaaaaaaaatgctcattgtttacctgaaattcaaatttaactgggagccctgtacttttatttactaaatctggcaactctaccccagatgtctgtgaggttaagtggggccaggcctacagctgacggaaggacagagagagaggtggcagggactgctggcctcctgaggcagagctgtcccaggtctggtggggctatgattccagagaggccagagactgagtatgaaagtggcaggcggctgggtctgaggagatgccaagttggcctcttgagggaaataaacaggtatatttagctgttgtggccttgcgccctgaggccaggaagcagctttttagcctaaatccagatgttaaaaacagaaatgaaatcagtatttatggccccaaaccctccaagcaagtcatgcagctcgttcccctgtcaaggcctcccacctttggcccacacagggcctgaccctcgtctaagcctgcgccctggggaacggaccctgggggtggaggtggtgggtcaggccctgctctcactttcacacccgcttcctagccctgaaaccagagaggttcctgaagtccagcccagccaggcctgtggggctgctgagaggggttaagtaagagggagagtaaaaaccgacacttgggaggaggcttttaaaataaacatctgcggggagggatgctctcaaggaggctgcggtttgcagctcagccagctgtgttccagctaatcagcctccttgggctactctggagttgctgccttggccctgggatggggtaggttaagaggacagagggaggtcagggagctgggggctgagtttccctgagtagaggctggcacaggagagaaggcatcacccccacctcgtccaggccagaagatgtccagcttcttgaggctctcctaagtctgcctctcctgggaccaagagaaaatcccggtccttgaccaaggtgggccttggggggagtggggtgtagagggaggggcactggagaactgactctacagaaagtcaaagctggcaatccaacttcttcccctcagatttatagatgggaaaacaggcttgagccacgcagagacttgaccaagctcacacagttccttagtggcagagcagagcaaatattctctttcttttacattctggatttccatatcttctctccctcctggtccagcccaacctcagggcaccccccacgaggtgggcgggggatggctttgtcacttgcacccactcggggtgctactcagagatcttgggtgcacataggacgtgggtgggccgagcttctagctactccgtcaggcccttcctgtcattctgtctctgcctcccttctccctgcttctccgtgttcctcctcattcttttctgtgtgcagggagactacaccccccaccccgctctttctctggcgcctctgaggtcccccctctagcccctaaatcactctggaatcctggctctttgaagccagatctgggcccccctcccctaccccttccattcccaggctgggaaaggctgaagaggctgacggctggaggggagggggcggggcggtggcggatctggcttccttttggagttaattagggaaaacagagaaatgtcagcggaatgaaagggctgggggtgggggccagctggggtaggagaggaggaagtgggcagctgctccctcccactcaacccctctcccccgcccccagaaagctctcagctccggggatttgcgacatgaaatgggggctgtagaaacctgagcgctggtgcgtgaagagaaaaaccgaggcgcatcccggctctcccctcccgtgtgccctcctcctcttatgccggcttgaaaatatttcctgtctctctatttctcaatccctggttgatgtcccaggattactcagcctctccggctttagtcactctcgctacccgctcccagggtccagggtggaggcagagggaggctgggagagaagctctactgccagctgggcctgggctggcctgggcatccctgaggttttaactgtctcctaaccacagaggatctcagggcctccagcagcgagccccaatgagtcaaactcttgtttcctcctctcccacccccgacccagtcagggcaggtgaggggtagaggtgatggcatgctggatgtgacggtgttgatgatgtattgcacaggatgaagcaccatctcatttagtcctcacagcagccttcacagtgcgtacaaatcagctggcaattccgagaggctgcattctaaacaagttcctgggtgatgctgagccagggccagagtgtggacttctctgggccccagtttcttcttctgtacagtgggacgttggactggaggtgctgtctgatgtcacctagctgtggcactctgagcctgtgcctaaagtgtccctgagatgtctagtccccgagatcatcatctcctcagcttcatagagccgagctcttctccatcttctctctacctcccattcactcagaacagggataaggtccaagctgctggtggtgatggtgactgactgtcccttccagcatgcgcttaggtacacttgggcctgaatgcccctctaacaaatgctaccgggtatggccttggtccttctaacacttggttccctcatctgtaaaatgagggtcataccacatagctggctgggctgttatgtagaggttaaaagtgattgtgcatgtgaagcatccagcagagtgcctggcacacagtaggtgctcaaatgctgttttgaaatacaaaaattagctgggctagtggtgtgcacctgtaatctcagctactcaggaggttgaggcaggagaatcacttgagcccaggaggcagaggttgcagtgagccgggatcgcgccactgcactccaggctgggcgacagagcaggactccatcttaaaaaaaaaaaaaaaaaaatgctgttttgaaatggaggcttggaagagcactcttcacccccaccccacacacttactaacggaactaccgaatctctactcgtgccaggccttgcttggcaaaggctaggggcatgtaaagccatggtttcatggctgctgccctccaggagcccatggtctagtgtgggagtcagaggctcccttgagaaagccagggcaaggaactgagagcccgtgtcacagccctgagagaaataccagcgaatgtgttttgagcacttacatctaccaggcactattttacgtacctgacatacattttcttatttagcattcactaaaaccagaagaggtggttaccattatcatccccattttgcagatgagaaaactgaagtggcataaggaggttaggtagacttgcccaggatcacagtgagtaaggaaaggagctaggaatcaaacctagactttctcactccagagcctcttaacctctaccctcaactcttgtgaagagagactaccttggtgacccctatattcccagtgctcagcgtggtcaaggcccagggtgctgtataggcattcattaactgctggggatataagacagtgactgttgaggaccctaagtttagctcccacctgatcttcctctgtctctgcagaagctgctgatgggagctccaccctgggagggggtgccggcaccatgggattgagcgcccgctacggaccccagttcaccctgcagcacgtgcccgactaccgccagaatgtctacatcccaggcagcaatgccacactgaccaacgcagctggcaagcgggatggcaaggccccagcaggtggcaatggcaacaagaagaagtcgggcaagaaggagaagaagtaacatggaggccaggccaagagccacagggcggcctctccccaaccagcccagcttctccttacctgcacccaggcctcagagtttcagggctaacccccagaatactggtaggggccaaggccatgctccccttgggaaacagaaacaagtgcccagtcagcacctaccccttcccccccagggggttgaatatgcaaaagcagttccgctgggaacccccatccaatcaactgctgtacccatgggggtagtggggttactgtagacaccaagaaccatttgccacaccccgtttagttacagctgaactcctccatcttccaaatcaatcaggcccatccatcccatgcctccctcctccccaccccactccaacagttcctctttcccgagtaaggtggttggggtgttgaagtaccaagtaacctacaagcctcctagttctgaaaagttggaagggcatcatgacctcttggcctctcctttgattctcaatcttcccccaaagcatggtttggtgccagccccttcacctccttccagagcccaagatcaatgctcaagttttggaggacatgatcaccatccccatggtactgatgcttgctggatttagggagggcattttgctaccaagcctcttcccaacgccctggggaccagtcttctgttttgtttttcattgtttgacgtttccactgcatgccttgacttcccccacctcctcctcaaacaagagactccactgcatgttccaagacagtatggggtggtaagataaggaagggaagtgtgtggatgtggatggtgggggcatggacaaagcttgacacatcaagttatcaaggccttggaggaggctctgtatgtcctcaggggactgacaacatcctccagattccagccataaaccaataactaggctggacccttcccactacataatagggctcagcccaggcagccagctttgggctgagctaacaggaccaatggattaaactggcatttcagtccaaggaagctcgaagcaggtttaggaccaggtccccttgagaggtcagaggggcctctgtgggtgctgggtactccagaggtgccactggtggaagggtcagcggagccccagcaggaagggtgggccagccaggccattcttagtccctgggttggggaggcagggagctagggcagggaccaaatgaacagaaagtctcagcccaggatggggcttcttcaacagggcccctgccctcctgaagcctcagtccttcaccttgccaggtgccgtttctcttccgtgaaggccactgcccaggtccccagtgcgccccctagtggccatagcctggttaaagttccccagtgcctccttgtgcatagaccttcttctcccacccccttctgcccctgggtccccggccatccagcggggctgccagagaaccccagacctgcccttacagtagtgtagcgccccctccctctttcggctggtgtagaatagccagtagtgtagtgcggtgtgcttttacgtgatggcgggtgggcagcgggcggcgggctccgcgcagccgtctgtccttgatctgcccgcggcggcccgtgttgtgttttgtgctgtgtccacgcgctaaggcgaccccctcccccgtactgacttctcctataagcgcttctcttcgcatagtcacgtagctcccaccccaccctcttcctgtgtctcacgcaagttttatactctaatatttatatggctttttttcttcgacaaaaaaataataaaacgtttcttctgaaaagctgaacgtttctgtataagcgatggaagctcctggcatgtgtgcatgaagtgatgagctgaggtgggtgctggaagaagggcggaatcgggaggccactttgtgtcattgcgcgtctagatgtttccgaattgcgtgtgtgtgtgtgactgtgcaatatggttgtgtatgcttgcaatgccgttgtgcctatgagacagtgtgcgattgtgtgcctatggatctgtgtaccgtgtgccattgtgtgatcggtccgctgtgggggtggggatctgagtgcggcgtgtcagtgtgcagtggagtgtgcagtctaagcttgcggctgtctccaggcagaagaggagaccccggcgcgggcgggggcgggttggcgccgggcaaacgccttgggtagaggggagaggacgtttcgttagttcccgccccttcctgactaaaattgcctacccgaagcgccccggagggcttcacgggaggagggtagactctcctttgcccccgcacccccacccccgctgcctaggggttttgggaaagccgcgggagtgggagggaatgcgggaggtgattcttccaaagccaagtctgcagctcgagcctcagtttccccatctggaattcgccttcccgctgacatctccgtagcgaagcctaagaaattggagggctcatcctcttcttgcgggggtcaaggggactgaaaggacgtgcaggaaatgagatccatcgcagactcagctcccctccctccttcctgtcggtgcttttccactcactcgcctgctctcccatctccccgccccctccgcctgcctcctcgaagcactgtgggattccgaggttgctgcagccagagaagctgcagaaaaacacggagctgggggtgaagggggacttaaaaggggaactacccggaaggacccaagaacacaaagacagagccactgcggttatctggctggtcagcaagggtatgcggcttcctccgcgctgcggaggctcccagagccaggtcacccattctgccagctcaagtctgttgtcatgggaaccaaaccttccaacttaagaatctgggggcgactttctagcgtgggaggaagggtggtgtgcacggttgctgagatggaagcagggttttgttactcagagccaggctgcggaggggcggggtgccgggcgcctgggttctattccaggcacagcagcagactggcagagcgcgtgagcagctgtggtttgtcccctaattggtatgtgtgcctataaagctctgaaccagaaaggcgtggcctccggggggacgggagggaggcggcaggcaacccatccccacacctcaggccatactgaggaggcagctgcccaggctccagggctatttaaaaggcttttatttccagttccagagcccgcccgaatgggtttgtggtcctctccaggcctctccctgtctatcctgggcctgctcattgctggtctggcttttttgtgcaggtcataacg

SEQ ID NO: 444 - DNA, 171947 bp, Homo sapiens
  source 1..171947: mol_type = genomic DNA
ttgatcaagaaaaaattttctgagacaaggtgttgttttggttactattacataattgtctatgagtaaaattggaactcactgtggaataatatgtcataatagctttacttgtaagtgaataataaagtataaacaggaaaattaaagcaaagttatttttagtgtgtgtagtaactccacaagaataaatgtcttatgcatagatatgtaatgcatcatgattgaaacgacaaatatattgtatttatatttctgtgcttggaaacttatggggaaagagattctggaacataaaagcttatttctactagtttcagttggttttgaaaaaacatccttacagtctagatttaaacaaaggaaacttctttcagtaccctgaaggtctgtgatttctctctcacacctaggcattgtcatgctgttctctcccacatccaggccttttcactgatccactcctctcatgtttcctgggaaagcgtttgctaacattaaaggcccaattgaaggcccccctaacccccttggcttctcccattatggtaattatctcagtacactgcaattccctgtttgcttttatatccttataatctctgtgaaggaagctactgtgtctatattgttcaccttaaatccccaaacatattgtctgatgcctaattatgtgtttgtttaatgaatattaaataacaacaaatatcgaaactaagttatcaggtcaccaagaacaaacttaaagaaatataatgtataaatatggctgatttctgtgtgtttcttttctttttttccttgtctcagctcttagagagttaagagtatagagagggaaaggtcaaagaggaggtggatatcttatcaaataaccctgataaatgtagtaagtataagaataaacacattatcaaggttcagtggtggaagaacaagtggtggtcatgtcttttaatagttgtgttggtccttacggccagttctttgttactgtgtgtttcttaaactgaacaattcaaaaaagttaactccactatgtttgaagcaatattggtggcattaaggttagtgcatggattcccaagaaagataacttgaggtgacactgtttaacatatatcgattcaattatgttcaatcaacactagtcctcttatctctgacaagaaggatttcagatcttggataattcaaaaataataatgtgtctgagaggatgcagtaaacggttaggcctcttagtgtcgctgttgaccactcaagaaggagaacgcagctggagaactagtccaccatttccttgctcctaaaatgcaaagaaccagcaaatcagactcagaagatccggggcggctgccaacctcacctcttagtcaaccagctgtttgacctgtgaattaggcccgtaaaagacttcgtttcttgagaaaataagattggagtccgtcgtaggaaactggaaccgaattcagagaaagcgattcaccgaaaaggaaatgaccaattgcctgagtttccgaaatggcagaggactggccctgctgtgcgcgctcctggggacgctgtgcgaaacaggatccggtcagatccgctactcggtgtctgaggagctagataaaggttccttcgtgggcaacatcgctaacgacctggggctagagccccgggagctggcggagcgcggagtccgcatcgtctccagaggtaggacgcagcttttctctctgaatccgcaaagcggcagcttggtcaccgcggagaggatagaccgggaggagctctgcgctcagatcccgctgtgtctggtaaaaattaacattctggttgaggataaattgaaaatttttgaagtagaaatagaaattaaagatattaatgataatgctcctaatttcccaacagaggaattggaaataaaaattggtgaactaacggttcctggaacccgatttccaattaaaactgcttttgacccagatgtaggcattaactccctgcagaactacaagcttagccccaatgactacttctctctggctgtgaatagcgtctctgagggggccaagtatccagagctggtgctggagcgggccctggaccgtgagaaaaaagaaattcaccagcttgtcctggttgcctctgatggtggcgaccctgtccactctggcaacttgcacatccaagtgatagtcctggatgcaaatgacaacccaccaatgtttactcagcctgagtaccgtgtgagtgtttgggagaacgtgcctgtgggtacccggctgctcacggtgaatgccactgaccctgacgagggattcaatgctcaagtgtcttatattctagataaaatgcctgggaaaatcgctgagattttccatcttaactcagtgagtggagaagtatcaatattaaaaagtctagattatgaggatgccatgttctatgaaattaaaattgaagcacaggatggaccaggtcttctttcaagagccaagattctagtcacggttctggatgtgaatgacaatgctccagaaattacaatcacgtctctcacaagctcagtcccagaagagggcaccgttggaagagaaattgctcttatcgacgtgcatgaccgagattctgggcagaatgggcaggttgaagtttttgtcctgggaaatctgccatttaagttagaaaaatcaatagatcaatattaccgcttagtgacggccacatccctggaccgcgaacaaatatcagaatataacattagtctgagagcctcagatgggggaagcccgccactgtccacagaaactcacatcaccctgcatgtgattgacatcaatgacaacccacccaccttccctcatttatcctactccgcctacattccagaaaacaaccccagaggagcctccatcttctcagtgacagcccaggacccagatagcaacaacaacgcccgcatcacttatgcattgaccgaggacactctccagggggcgcccctgtcctccttcgtctctatcaactccaacactggcgtcctatacgcgctgagatccttcgactacgagcaatttagagacttaaagctactggtgacagccagcgacagcgggaaccctccactcagcagcaacgtgtcgctgaacctgttcgtgctggaccagaacgacaacgcgcccgagatcctgtaccccgccctccccacagacggttccactggcgtggagctggcgcctcgctccgcagagcccggctacctggtgaccaaggtggtggcggtggacagagactcgggccagaacgcctggctgtcctaccgcctgctcaaggccagcgagccgggactcttctcggtgggtctgcacacgggcgaggtgcgcacggcgcgagccctgctggacagagacgcgctcaagcagagcctcgtggtggccgtccaggaccacggccagccccctctctccgccactgtcacgctcaccgtggccgtggccgacaggatccccgacatcctggccgacctgggcagcctcgagccctccgccaaacccaacgattcggacctcactctgtacctggtggtggcggtggccgcggtctcctgcgtcttcctggccttcgtcatcgtgctgctggcgctcaggctgcggcgctggcacaagtcacgcctgctgcaggcttcgggaggcggcttggcgagtacgcccggctcgcactttgtgggcgcggacggggttcgggctttcctgcagacctattcccacgaggtctccctcactgcggactcgcggaagagccacctgattttcccccagcccaactatgcggacacgctcatcagccaggagagctgtgagaaaagcgagcctcttctgataactcaggatttacttgaaatgaaaggagattccaacctacttcaggtgagtttatttatttctttgattattaagaacaaatatgagaatgtggttattataaagctttaacacatatgtatttgagaaataaagccatgaggttgtcattagtcctttgactaaatatttgtccccctttctttctgggcctatagtaggactgcactccccggtctggttatggttgagtgggcttagggaaaaaataatacatcgtgagtgaaagtaaagtgtcacttcctagaggaatctgccactgtgagaattttcagatctctaagttactatttgaaattgtgactgctccttctacctgggtccttgagtaactatgatgagagaaacacaacactggtttgtatacctgtgataaataggcctttttcattttaaatccctgtgctttggagtttgtcattccaacctgtatagcttatcctgatacatacaagtaaaaatacatatgaataaaagatattttatgcccatgaaattaaatgatgtttgactccttccaagacaggtgacactctttttttctttctccttccttccttcctctctctttcctccttccttccttcctctctctctttcctccttccttccttccttcctctctctctttcctccttccttccttcctctctctctttcctccttccttccttcctctgtttctctctttctttctttctttctttctttctttctttctttctttcttgacagggtcttactctgtctggagtgcagtggcatgatcacggctcactgcagccttgacctcgcagactcaagtgatcctcccacctcagcctcccgagtagctgggactacaggcacgagccaccctcccagctaatttgtttttgtttttgtagagatggggcaattgctatgtttcccaggctggtctgaaattcctgagctcaagtgatctgcccacgtcagcctcccaaagtactgcgattagaggcatgagccaccatgcctggcctgttattcttttcatctcaataacataaaaattggagaacaaaaatgtagaggctgggtgcagtggctcatgctgtaatcccagcactttgggaggctgaggcaggtggatcacttgaagtcaggagttcaagaacaccctggccaacatggtgaaagcctgtctctactaaaaatacaaaaattagctgggcatggtggtgggcgcctgtaatccaagctacttgggaagctgaggcagaagaattgcttaaacccaggaggcagaagttgcagagagccaaaattgggccactgcactccagctggggcaatagagagagactccatctcaaaaaaaaaaaaaaagtagaggctggtcaaatggttttacctatagtgcctgttacatatgcctaatgtatatgcttatgtgtgtattcattttgatttcaacattttgcctgagggtggaaagctcacctagctaaattattatgagccttggagtggtatttcttgtccttgagaaggacatcaaaaacatgtaaaggaatatgtctcagcctctgcgggagatttccagacaatctcttccaacaatggaatagaagtcccttcttttgtcatgttctacaactttcttgagccagaaattgttggcttattctgcaatttatgaaattattttcactcatgaaatcatatgagagttatccaaaattagaccaaaatatgttttattagaactcaaacaaaagaatagattcctccctcaatatattaggaaaaggcacatttaaatgtatgagacaacagggccagaacacaaaagctgtaagcagagtaaggtgtattctcactgaaacatggaaatacatcacagaatttaaaaggcccatagccaggggaggacttctgagcctaggactttgagacctacttgggcaacatagcatgaccctgtctcaaaagaaaaaggcacgtaacttttaacatatcatttttagaaaaaaaaatgtttatagtattagtatcactttccctgtaaggagaaaaaaaattaattagctgtgtcaggggaaatttggatgctcaaagataatttctaagaattctatatgaaacatagcctacatatgtgtcatgaaaatacactgagagtatggaacccatacaattccacctacttgtacaggtaatggaaggtctcagacatcccattttcactaaaaaggatttatttttatttttttgaagaatgggcaagaatccactacaacagaaagggaggagaagttcatagtaaaaggaatggaaagtataaaggcatgatgcaaggaaacaagtgaaaaggtatcttaagaaaacagataataggctgtttcgaatagagtatgagtatgggtgagcactgcaaaatagtagaataaattgttgagttggatctcatttggtaatgcatttgaaataaagggatttgctttgaaccaagactggttctaagcctggaactacagaataagttccaaaattgggtgtctaagaactctgaatacctctccaatatttaccagtggtcaagtcaaactcgttttgctcattaatggtataagtcggctggagctgagaattggcattatagagaatgtttttgagacagagtcttgctctgtcacccaggatggacttcagtggcatgatctcaactcactgcaacctctgcctcctgagttaagtgattctgctgcctcaacctcccgagtagctggcgttacaggtacccgccaccatgcctggataatttttattttttttagtagagatggcttgcaccatgttggacaggctagtctcaaactcctgacctcatgtgttcttcccaccttggcctcccaaagtgctgggatcacaggtcactgcacccagcctagagtatttaatatacattcatataaaaaagaagcactggtttcataaaacaaatgtacattatatgagattccacttcataaaagcatgtatgtgtaccccaacactaaattggcccttttaacaaaatatcagactttgtcctacttaactggaaagattatctatattttataaagaagagaaataacataatagtaaggctgtgatttcctcttttttgcaaaaactatttttgaaaagtattactgaattgataacatatatatggagagatttaaaatactagataagggagcttattccaatgaatttacagaaaggtaggtattttagtcaactaaaaatataaataaaaattatcaattcacttatttggatacagcagtcatgccagagtttataaatatagtgaaatcactgaagatttttttttacccccaaaactgaaaaaaatggcagtgtaccttgtgaattttttaaatgaaaaaagaatacgaaatgatgaaggcccttatctgatgatgacaaactagaaaactgaaatgtaaaggggaaaatgtgagtatgtgtttccctccagcaaattaaagacagggtacatagattcaagaggttgcgctttgaggataaaaagctgggccctgtgcagttttccaagacaacctctgggcgccgctgtcgaccaaaaggaagtgaaggcttctcaattctgcaggagcgtcaggcagggtgccttcctgctttgtccggtgcactgagcacagacgctgctcctgttcaccctcgagcgcctaactaataagtcctaagctcaaatcacagaagtccagggtgctgccatttctttttgaaaaacatcccagaggaaagaagctccgcggagagttcctgaaatgcagagagccagagaagccgaaatgatgaaaagtcaggtactgtttcccttcctgctgtctttgttctgcggggccatctcccagcagatccgatacacgattccagaggagctagccaacggctcacgggtggggaaacttgccaaggatctggggctcagtgtccgggagttgccaactcgaaaactgcgggttagtgcagaggattatttcaacgttagtttggagagcggggatttgttagtgaacggtaggatagatcgagagaagatttgcggaaggaaacttgagtgtgcactagaattcgaaacggtcgctgaaaacccaatgaatgttttccacgtggttgttgtaatccaagatattaatgacaatgcaccacgtttcgttgcaaaaggcattgacttagaaatttgtgagtcagccttacccggggtaaaattctctctggattctgctcaagatgcagatgtggaaggcaattcactgaagttatacaccatcaaccccaatcaatacttctctctgtcaacgaaggaaagtcctgatggaagtaaatatccggtattactgctggaaaaacctctagacagggaacatcagagctctcatcgcttaatcctgactgccatggatggcggggacccgcctctaagcggcaccacccatatctggatccgagttacggatgccaatgataatgctcccgtgtttagccaggaggtatacagggttagcctccaagaaaacgtaccgtggggaacctccgtgctgcgggtgatggccacagaccaggatgagggcattaatgcagagatcacctatgccttcctcaattccccaataagtaccagcctcttcaatctcaatccaaatactggcgacatcacaaccaatggcacattggattttgaagagacaagtagatatgtgttgagtgtggaagctaaggatggaggagtacacacagctcactgtaatgttcaaatagaaattgttgacgagaatgacaatgccccagaggtgacattcatgtccttctctaaccagattccagaggattcagaccttggaactgtaatagccctcataaaagtgcgagacaaggattctgggcaaaatggcatggtgacatgctatactcaggaagaagttcctttcaaattagaatccacctcgaagaattattacaagctggtgattgctggagccctaaaccgggagcagacagcagactacaacgtcacaatcatagccaccgacaagggcaaaccagccctttcctccaggacaagcatcaccctgcacatctccgacatcaacgacaatgcacctgttttccatcaggcctcctatgtggtccacgtgtctgagaacaacccacctggcgcctccattgcacaagtaagcgcctccgacccggatttgggacccaacggcagagtctcctactctattctggccagtgacctggagccgcgggagctgttgtcctacgtgtccgtgagcccgcagagcggggtggtgttcgcgcagcgcgccttcgaccacgagcagctgcgcgccttcgagctcacactgcaggccagggaccagggctcccccgcgctcagcgccaacgtgagcctgcgcgtgttggtgggcgacctcaatgacaatgcgccacgggtgctgtaccccgcgctggggcctgatggctccgccctcttcgatatggtgccacgcgccgcagagcccggctacctggtgaccaaggtggtggcggtggacgcagactcaggacacaacgcttggctgtcctaccacgtgctgcaggccagcgagcccgggctcttcagcctggggttgcgcacgggtgaggtgcgcacagcgcgtgccttgggcgacagggacgcggcccgccagcgcctgctggtcgctgtgcgtgatggaggacagccgccactctccgccaccgccacgctgcacctaatcttcgcggatagcctgcaagaggtattgccagacctcagcgaccgccctgagccctctgacccccagacggaactgcagttttacctggttgtggccttggccttgatctcagtgctctttctcctcgcggtgattctagcgatcgccctgcgcctgcgacgttcctccagcctcgacactgagggctgctttcaaaccggtctctgctccaagtctgggcccggggttcctcccaaccacagcgaggggactttgccctattcctacaatctatgtattgcctctcattctgcaaagacagagtttaattctctcaacctgacaccggaaatggctccccctcaggatctgctgtgtgatgatccttctatggttgtatgtgccagtaatgaagatcacaaaatcgcttatgacccttctttgtcttcgcacgtgagtttctgcaaatctagttaaattttatatatggcggccgggcgcggtggctcaagcctgtaatcccagcacttaaccaggctgaggcaggtggatcacttgaggtcaggagtttgagaccagcatagccaagatggtaaaacccggtctactaaaattacaaaaattagttgggtgtggtggcacgcgcctgtagtcccagttactcaggaagctgagacaggaggatcgcttgagcccgggaggtggagattgtagtgagccaagagtgtgccactgcactccagcctgggtgatgggagggaaactgtctaaaaaaacaaacaaacaaaaattatatattgcattttcttctcattggtgtataagtaattttgattttctttcattgttctagtgatggtatctactgcgggagggggtactagatagatggagattgctttcttgattgctcagtagtcttggcaatttaattttcaatctttactgttggcatttctgtatggttggcaaatcttgctaaagagacctgtttcctagatgttaacacttagtaatagcagtgccttttcttagttgatatgcaatactatattttcaagtcattttattcttagctctttataaatgtatttagagttcttcccacccaagttaaagttcatcaattacattaattatgtaattgatgtaattatgtattaatgtaattatgtaattaatgtaatcttcatcaattacattctagtttgtctttttgcagcaacatgtatgtttaatacagccttccaattattaagactcttaacactttgtctcatcacaagtagcaaatattgtccaattttatatttgcatcactaactttgagtcaatattattcccactctataatttcagtcaatgatatttcataattttcttaaccattcctaaattatttgtttttatgctctttctattttgtctctattaaaacaaagaatgtaatgaacatttgggtttataaagcgttttccatacttcttgtttctttagtgtagatttctgaggaattagttaaatctataaacatgttgagatttttttaatgcatactgtcaaatttatttccaaacatcttatttcacctctcaatcatccgcagtttgtgcggtctttgaggattgtgaaaaacacgtttaatctactctctcaaagtctgagggtttttaaattctgtatagctaatgcccttttgtatgagtcatttctactgctaattgttaagtgaggaataagcttaagaactgatgtactgctttatctcaaattttcacagattagtaaattactgtaagtattcataagaaagaaagcgatggcacatgcaatgataatccatgttcggctaccaaaacatttccttttactggctatttctaaaatgagagctaaagtaaagttagaaattgtaaaataatactgaatgtgtcatgtgaaaaaatcactaaactattatctgcactttatagttattcagtctaacttttctttttatttcttttttatttttaagatcagagttatttacccattgttttaggctttgcatttgaactggtcattcatgaaacattgaaaggtttcataaaaattactactctatgaaaggtattgttctaaagattgagaacacattgtgaacaagatagtcatatgcatagcttgtggccaagaatctactgtacacaaaattaaggagcaaattctcttcccaaacctattatcctatttgtcaatctcatttgtacagggtaaggctaactcttgaacagtaggtgagttttttgcaagggaattgaagcattgccccaggttctagagggtcaactcctgtgaggaaacttgttactgcataaattgggactaaagccagacctccaagttcctgtcccactgtcttttcacttatctgtctcatccatttttcaagtccacctttgtctttaggagagataattatgtccctcacacaatacgctatactgagaatgggctgtggggatgaacaatgtgaaaactgaaaagaggaagaacacatcttaggaaaaaaatcgtcatattttctctaagaaaataaataacttcataaagtttattgtacaggaagacttggatcattcttgaattttcattgcaaatcaaaaacaggaatttgactttattatcttgggagaaataggaatagaaaagtgtataaaaaataaactttttttaaccaagaataaattgcagtaacaggttaagactctgggtgtcgctgttcaccaatcagggggaaaagacaaaccagaaatttaatcagaatcacaagatttctgcagcacaaagcactggctctggagctttatgaaagcttcaagcggaagccctgagagctctggctgtgaatgcactttattttggacccagaagatcctggggctcctcaggcctcgacagagggaaaaccgaagcacaggcgactccgcggcggggttgtaatggcggcgcctcctgctcgcccagaccacacccggctgctccagatctgccttctcctgggggttctggtggaaatcagggccgaacagattctctactcggtgtttgaggagcaggaagaaggctcagtggtgggcaacatcgccaaggacctggggttggcgccccgggagctggcggagcgcggagtccgcatcgtctccagaggtaggacgcagcttttcgccctgaacccgcgcagcggcaccttggtcaccgcgggtaggatagacagggaggagctctgcgacagatctccaaactgtgtgacaaacctggagattcttctagaagatacagtgaagattttgcgggtagaggtggaaataatcgatgttaatgataacccacccagttttgggacagaacagagggaaataaaagttgctgaaaatgaaaatcctggggcaagatttcctcttcctgaagcttttgatccggatgtaggtgtaaactccctgcagggttaccagctcaactcaaacggttacttttccctggacgtgcaaagtggggccgatgggattaagtacccagagctggtgctggaacgcgctctagatcgcgaggaagaggcggttcaccacctcgttctcacggccttcgatggaggtgacccggttcgctctggcactgccaggattctcataatacttgtggataccaacgataatgctcccgtgttcactcagcccgagtaccacgtaagtgttcgtgagaacgttcctgtaggcactcggctactcaccgtaaaagccactgatccagatgaaggagccaatggagacgtgacgtattctttccggaaagtaagagacaaaatatcacagctatttcagttgaattctctgagtggggatataacaatattggggggtctagattatgaggactctggattctatgacatagatgtagaagcccatgatgggcctggtctccgagctagaagcaaggtactggtgacagttctggatgaaaatgacaacgcaccagaagtcacagttacatctctcaccagctcagtccaggaatcttcttccccgggtacagtaattgcacttttcaacgtgcatgacagtgactcaggaggaaatggcctagtcacatgttctattccagataatctgccattcacacttgaaaagacctatggaaattattatcggttgttgacacacagaacactggacagggaagaagtctcagaatataacatcactgtaactgccactgaccagggaactcctccactgtctacagaaactcatatttcactgcaagtgatggacatcaatgacaacccacccactttccctcatgcttcctactctgcttacattcctgaaaacaaccccagaggagcctccatcttatctatgactgctcaagaccctgacagtggtgacaatgcccgaatcacttactccctggccgaagacaccttccagggtgcacctctgtcctcctatgtctccatcaactccaatacagggatcctatatgctctttgctccttcgactatgagcagtttagagacctgcagctgctgatgacagccagtgacagtggagaccctccactcagcagcaatgtgtcactgagcctctttgtgctggaccagaacgacaatgtccctgagatcctgtaccccaccttccctactgatggctccactggtgtggagctggcaccccgctccgcagattccggctacctggtgaccaaagtggtggcagtggacagagactcaggtcagaatgcctggctgtcctacagcctactcaagtccagcgagccgggactatttgcagtggggctgcacacaggcgaggtgcgcaccgcacgggccctgctggacagagacgcgctcaagcagaggcttgtagtggtcgtccaggaccatggccagccccctctctcggccaccgtcacactcactgtggctgtggccgacagcatcccagatgtcctggctgacttgggcagcctcaagccttcagcagacccagacgactcgggcctcacactctatctcgtggtggcagtggccgctgtctcctgcgtcttcctggcttttgtcacggtgctgctagcactcaagctgagacgctggcacaagtcacgcctgcttcacgctgaaggcagcaggttggcaggtgtgcctgcctcgcactttgtgggcgtggacggggttcgggctttcctgcagacctattcccacgaggtctccctcaccgcggactcgcggaagagtcacctgatcttctcccaacccagctatgcagacacgctcatcagccgggagagttgtgagaaaagcgagcctcttctgataactcaggatttacttgaaacaaaaggagaccctaatcttcaggtgagtcaatcttataatagatcataccacactgaaatatagacaaagagttgtgtaaatgtctctcattttatatgtaatatatcaaataaagttgcctcttttaatattttattgctttaaagaaaactggtggatgaccttccaataatgatcaacagtatttaccacacaaaaatgttgtttattacttatcctttttggtcttcattcagttgtagtttcagccagaattttctaattttacaactctgagccacctcatttccttaaatttccttttctgtgctgggtgtggtggctcacacctgtaatcctaacactttgggagtgtgaggaggacggattgcctgagctcaggagttcgagaccagtctgggcaacatggtgaaacccagtctctactaaaatacaaaaagttagctaggcgtggtggtgtgtgcccgtagtcccagctaccctggaggctgaggcatgagaattgcttgaacctgggaggcagaggttgcaatgagctgagatcatgacactgtactccagcctgggcaacagagcaagcctctgtctccaaaaagtaaaataaaataaagtaaaataaagaataaatttccttttctcttaggtgttcctgaaaagatacaagagacctgtaaaatagaaggcaattgtgtaaattcacatttacaatattctttctcatgaagctattgttggatctggactgagggttttttaatttcctattttcacactctaccatgctttgcttgaagtttacttttccttccttgaaagggtattttccattataacaggcaacgtcaatttaagaatactggcaatttgtgagtttaacttttagatataactttaacaggatattttctcaatgaactggtatatttcaaatattttcttgttgctgttctgagatgcaccagaagtgactatgtgtgattcctctggtgcactcctgtgattatgagaaatatttccaagctaatttcagtcatatataagtagattctaggagtaactttaataatttttaaattgcttatcatgacatcactattgagactttcttgatttccaaggaaaatataagtttttggagtcttttctcttgtcatcatgtgagcctctttcaaaggttgagttacttgggttctggactgatatgatttacgctgcttagtaaggtggcctcatccctattgctacaaattgctttcagatatttctgtcatcatgtggctctgggattattttatatgagggaaaatattttgtgtgtaggggatatacaacacttttgttctttgtgctttcatttaggttctgtgagaattcaaaattcatgaatgcatatgcttacacaaattagtgtaatttgataactggaagttgtagtgatagactgtggaatatgcctcaatttgacttacaaaggagagttttagtttctacatggttttgtattcatagaaagttgtggtgcaatacatagagtaagctggaatatgatatgatgcagttacctggcttggggagcagaaagcagaaataacaagtgaatgttgagagacaacttacatctgaggagagattgtttaaagtaattaagccataaaatataatttggaaatgctcaattggtctgaaactgtgtcaagcatattcaggtgttggcattaggaatatattccagaatgagagtgccacatgttttaaaggcctaggaaagcagtagataatttataacctaaaatcaaattttttaaaaaatgtgtttttgttagaatgggcagtgggtttcttttagcaaataacaattttgattaaacaaattgttgtatattcatattacggactactagataactatattatgggccactagataactataagaaataaataggaaagctctctatgtactgatatgatctttaagatataacaactaaaaaagcaatgtgcagaatatggtatgttgtatgcttacatttgtgtaaagaaggagacagaatatttataaaaatccgttgccctatacaagacatatctccggaaggatacctaagaaactttaacactcatttcccctgtgaaagcatttctcctcatctaaagcagagatgaaaggaagaacctatgctgaatgcatcttttgaatttggaactatatgaatatttcacatattttaaaacaaatgaagactttataaattaaaaaagaaaagaaaagaaaaaagttcttagcaaatattgacaagccattagtgcagtttcctgagaaaacctctgagcgtcgctgttggtcaaaagaacgaagagaagcgtttgggagcctcttagaggggaacttcctgcacaaaccaaccacacagagaaggccagtatagattcggaaacagaaaacaaaagcaggaaaagtgaccttagcccggattctgccatccccggaaggcttattcctcctatgggcaaaggagcaaagggagccagaagatgaaagcgagctcagggaggtgcgggctggtgcggtggctgcaggtactgttgcccttcctgttgtctttgttccccggggctctcccagtccagatccgctattcaattccagaggagctggccaaaaactcggtcgtaggaaacctcgccaaggatctggggctcagcgtccgggacttgccagcccggaagctgcgggttagcgcggagaaggaatatttcacagtaaacccagaaagcggagacttacttgtgagtgacagaatagaccgagaacagatatgcgggaagcagcctctgtgtgttctggatttcgatactgtcgctgaaaatccactaaatattttctacatagcagtaattgtgcaggatataaatgataataccccgctattcaaacagactaagattaatttaaaaattggcgaatccactaagccaggtacaacatttccacttgacccagccctggattcagatgttggtcctaactcactacaaagataccaccttaatgacaacgagtactttgatctcgctgagaaacagactccagatggtcgtaaatatcctgagttgattctaaaacactctctggacagagaagagcacagtttacatcaattggtcctcacagctgtggatggcggagacccacctcaaagtggcacgacccaaatccgaatcaaagtcacggatgccaacgataaccctccagtgttcagccaggacgtgtacagggtcaccctgagggaggacgtgccgccgggcttctttgtgcttcaagtgacagccaccgaccgggatgaaggcataaacgcagagatcacctactcctttcataatgtggacgaacaagtgaaacactttttcaacttaaatgaaaaaacaggagaaatcacgacaaaggatgatttggattttgagattgcaagtagttacactctgagtatcgaagcaaaagatcctggagatctagcagcccactgcagtatccaagttgaaattcttgatgacaacgattgtgcacctgaagttattgtgacttcagtatctactcccctaccggaggattcgccaccaggaacagtgatcgccttgataaaaacgagagacagagactctggagaaaatggagaagtttactgccaagtgttgggaaatgccaagtttattttgaaatcttcctcaaagaactattacaaactagtgacagacggcgctctggaccgggaggagatcccagaatacaatctcaccatcacagccaccgacgggggcaagccgcccctctcctccagcataattgtcaccctgcacatctccgacgtcaacgataatgccccagttttccaacagacttcctacatggttcacgtggcagagaacaatcctcctggcgcctctatcgctcaaatcagtgcctctgaccctgacttgggccccagtggccaagtttcctactccatcgtagcgagcgacctgaagccgcgggagattttatcctacgtgtccgtgagcgcgcagagcggggtggtgttcgcgcagcgcgccttcgatcatgagcagctgcgcgccttcgagctcacactgcaggcccgcgaccagggctcgcccgcgctcagcgccaacgtgagcctgcgcgtgttagtgggcgacctcaatgacaatgcgccacgggtgctgtaccccgcgctggggcctgatggctccgccctcttcgatatggtgccacgcgccgcagagcccggctacctggtgaccaaggtggtggcggtggacgcagactcaggacacaacgcttggctgtcctaccacgtgctgcaggccagcgagcccgggctcttcagcctggggttgcgcacgggtgaggtgcgcacagcgcgtgccttgggcgacagggacgcggcccgccagcgcctgctggtcgctgtgcgtgatggaggacagccgccactctccgctacggccacgctgcacctaatcttcgcggatagcctgcaagaggtattgccagacctcagcgaccgccgggagccctctgacccccaggcaaaactgcagttttacctggttgtggccttggccttgatctcagtgctcttcttcctcgcggtgattctggcaatctccctgcgcctgcgactctcttccaggtcagatgcttgggactgttttcagcctggtctcagctccaagcctggacctggggttctccccaattacagtgagggtacattgccctattcctacaacctgtgtgttgcctcacaatcagccaagacagagttcaattttctgaacataaccccggaattggttcccgcgcaagatctcgtctgtgacaatgcctcttgggaacaaaatacaaatcatggagccgctggggtcccttttgcctcagatactattttgaaggtgagctttaattaatttattttcacttctggttttattgtttcacctaatttgggtaggaagttccactgcgtatttctttgtctgtgagttagatttggccaatgttgtgccttaattgtcttaatcttatctaactgaattttaagtgttttctctctgaagtgtgagatttatttacccatgattgcaaacctttatcacatgagatattgcactgtatttctttttcttcctcatctttacattacttctctctgcagatttgttgctattgagactttaggcaattagtttcaccttcaggctctttgttattcaaattttagttttacttcctcttagaatcataatacttcagagtaaagagagtcttcattttagtaggctttggaaattgggaaacaaagaagaaagacttttgcataatggcatggcttgttaatcacagggcatgggtaggacattgtcccattgacttgaagaccaacactcagtaagctaaatgtcttggaatcacaaatgtatttctaaaggacaggcaatgtttgaggtctgaggtgtctgctagaaagagtgcatttaacaaatgtgagaaatcattctctaacatgcattttaacaaattgctcttaagaaaaactacacattgagaaaaatcttacaacctatgttcacatcattttctacaaaatattacttaaaactttgcttttgaatttcctaattatatagaatttttattttcttagttttctatgaaagtgttattaaataaaatgactttctgaaatgtccatttttttcaatcaagaggtttttctatttctgttgtcatataaagatgatagcagtaaatatctgtctcaacatagaaaggtcactcagtacttctcgacaagtatctgctcatgctttcctgcatggatgatgaaataaaaccccatcctccacagttactatactggttgtcactggaactacaaatatttgaacatggtaatagaaaaacataaaaatgcatagttaacccaactcaaacgctgtctgagatagtggagagactttctcaaagtcctcacaagtaacaaagatctttatttcttctgcatatgacagctaatataacttacataaatcagtaggcctgtttggaaaggtgcatggagaactgggtttgtttccttggtattcttatatgcaaataagcacgttttcctaaatttatcctaataaggagatgaaatcttgaatcctacaaaggtaagaatttgaatgtcctaatttaatggactaaatatagataagaggtaaataaaggacataggctcccccgatgacgcattaaataaaatttttgtaaggtattgagatctaataatcatattgatctcagggattgtggaagtcttgctattcagaattaaagctgaattaacggtcataaacaacgctacacagttaaacattaaggatatggcaacattattagaaataaaattataactaaacttaggagaaataaaaatggaatttgatgcagtcactggttaggactctgagtgtcgctgttgaccaaagtgggaaagaagctgccgcagaggcgacccgactctgctccctccatactaaacacacagaccagacaagctcctacgaaaagccaacgctccacgcccattttcgtcagggaatatgtacccatcggctttagataaataaggaaacagcaggctgaaccagaactaagagaaaattgggcagagagaaggcaatggcgagtccacctaggggctggggctgcggagagctgctgctgcccttcatgctcctggggacgctgtgcgagccaggatccgggcagatccgctactcgatgccggaggagctggacaaaggctccttcgtcggcaacatagccaaggaccttgggctggagccccaggagctggcggagcgcggagtccgcatcgtctccagaggtaggacgcagctttttgccctgaacccgcgaagcggcagcttggtcaccgcgggcaggatagaccgggaggagctctgcgctcagagcccactgtgtgtggtgaactttaacatcttggttgagaacaaaatgaaaatttatggagtagaagtagaaataatcgatattaatgataacttcccgcgtttccgggatgaagagttaaaagtaaaagttaatgaaaatgcggctgcagggacacggttagtgcttcccttcgcgcgggatgcggatgtgggtgtgaactctctccggagttaccagctcagctccaatctgcacttctctctggatgtggtaagcggaactgatggacaaaagtatccggagctggtgttggaacagcccctagaccgcgagaaagagactgttcacgacctcctcctcacagctttagatggcggagacccggtactctccggcaccacgcacatccgtgttacggtcctcgacgcaaacgacaatgcgcccctgttcaccccatccgagtacagcgtgagtgttccagagaacatacctgtgggcactcggctgctcatgctaaccgccacggatccagatgagggaataaacgggaaattgacctactcttttcgcaatgaagaagaaaaaatttcggagactttccaacttgattccaacctgggggaaatctcaactctacaatcactggactatgaagaatccagattctacctcatggaagtggtagctcaggatggaggcgctcttgttgccagcgctaaggtggtggtcacagtacaggacgtgaatgacaatgcccccgaagtgatcctcacctctctgaccagttcgatctctgaagactgtcttcccggaactgtaatcgcgctgtttagcgtacatgatggtgattctggagaaaatggtgagattgcatgctctattcctaggaatttgccttttaaattggagaagtcagttgataattactatcacctattaacaactagggacctggacagagaagagacttcagattataatatcactttaaccgtcatggaccatggaaccccgcccctctctacagaaagccacatccccttgaaagtagcagacgttaatgacaacccacccaatttccctcaagcctcctactccacctctgtcacagaaaacaatcccagaggtgtctctatcttctctgtgacagcccatgaccccgacagcggcgacaacgctcgagtcacctactccctggctgaagacacatttcagggggcgcccttgtcctcctatgtatccattaactctgacaccggtgtcctgtatgctctgagatccttcgactatgagcagttgagagacctacagttgtgggtgacagccagcgacagtgggaaccctccacttagcagcaacgtgtcgctgagcctgtttgtgctggaccagaacgacaatacgcctgagatcctgtaccccgccctccccacagacggttccacgggcgtggagctggcgcctcgctccgcagaacctggctacctggtgaccaaggtggtagcggtggacaaagattcaggccagaacgcctggctgtcctaccgcctgcttaaggccagcgagccaggactctttgcggttgggctgcacacgggcgaggtgcgcacagcgcgagccctgctggacagagacgcgctcaagcagagcctcgtggtggccgtcgaagaccatggccagccccctctgtcagccaccttcacggtcaccgttgccgtggccgacaggatccctgacatcctggctgacctaggcagtatcaagacccccattgaccctgaggatctggacctcacactctatcttgtggtggcagtggctgcagtctcctgcgtcttcctggccttcgtcatcgtgctgctggtgctcagactgaggcgctggcacaagtcacgcctgcttcaggctgaaggcagcaggttggcgggtgtgcccgcctcgcactttgtgggcgtggatggggttcgggctttcctgcagacctattcccacgaggtctccctcaccgcggactcgaggaagagtcacctgatctttccccagcccaactacgcagacacgctccttagtgaagagagctgtgagaaaagcgagcctcttctgatgtctgataaggtagatgcaaacaaagaagaacggcgagttcaggttagttttctctttcggtaaggatgaccagaacattttcatttgtttcctttttcatgtttctgtcatattcagaatcagctagttatgtaaatagtggaacattatttgctgtattggagattaattttttttatataattcatgctttctccatttgttttcaaattctgttttgggaagtctagctgatatctgtagacttaagtgaaacaaataccttaaaggaaagtggttaaatataatcattttacccaaatattttgttatattggaactgcagttctattaatagaaaagatgttttatttattcaaattgttagatatattgttctcttttgagtgtctgcctagacaccattagtgaatgtgttttggaaaggataatgtataggactgatattttagtctacctgaaatttgtttaaggaaataatttacagtatttacataaatcagtggaaaggtacagagaacttctgggtcataaatatcagaaaagaggccgggtgcggtggctgacgcctgtaatcccagcactttgggaggctgaggtgggcggatcacgaggtcaggagatcgagaccatcctggctaacacggtgaaaccctgttctactaaaaatacaaaaaattagccgggcgtggtggcaggcgcctgtagtcccagctactcggaaggctgaggcaggagaatggggtgaacccgggaggaggagcttgcagtaagccgagatcgcgccactgcactccagcctgggagacagaacgagactccgtctcaaaataaataaataaataaataaataaataaataaatatcagaaaagtagataaaatttatattaatgataacatgtagcattctaaagtctggaaagtttgtgttaagccatgtagttattggatatgtgggcttgttgagagaagaaatcagtgtaaaggaaccttaaggttgggcttcgttctgtgatgtaaagcctccagagagttacatactgctgcactcaataaatgtaaatatgtcacacacctggcatcttctgttatagataaaccctttacttattagaatcaatacctactgcaatgttagcgtttctttaagtgtaggtgcaattcttctttattacttgagtttaaggttgtatttgaaaaaaaaagaactcaacttaaagatggttcaaaattttaaatttcatatctaacgtatgtgctcatcttaaattaatagatttgtcttaatgaaatactggcctatgtgcctcaaattccaggaggatgtgttatgtaatgaaagaactactatatttcccttctgcatctgatttgctgaagatgattttcagatgtttcttattaaaatattcttaatccttcaaattttgtacttttaaaaccttgagcatcagcttcaaataatgactaaataaggggaaaaggtaataaaatattacaaatgggatagtaagctacattactcaaccacatgaaaggttaattgacacattaaagaacctaagaccacttgatttttattttttaaacactgttaaagagcattcaagtatatctatatctatatacatatacacacacatatatatacacacatatatatacacacatacacacacacaaacacacatacatacacacatggacattctgaccaaaatgtaaaatgtacaaactcaccgaatagtgaatgcatccaaagagtaacaagagaatctatacagtaggtgtcgacattattcactcctatgtgaaaacttgcttttccattttttttaaaagaaaatgttatatgcttcttagggtaaggtgtttgggaaaaaagtaaaggttatagatttgggtacatttcttctgagttaaatgttttgtgcaatggaaaaatatctttaaaccctctataaactactaacagactataaaatgcttgatccatacattttgaatgtatgtactgtatataccatatacttttaaatatctgaatctttagttttatatgtgttctgaagaataatttttcatactaattgaagtgttcatacaatgaacacttggcattgtgttggaaggcacttgctttggaatgttttggagcaaagtcttgagtcagttatatttttgatgtttgtataaaggtgacaatgagtgtctgtctagaattctggttactgtgagtagtttaagatgctataatgcttttccactataaggtgaattcggtgtggaactcattgcttattgctgcacacttgcctagttttagagtaacaatacattatgtaggctaaagataatttctttaggaagattttctggtttgaaaatggaattaaaactgtaagacacctgtcagaaacatggaaaatggcatgttattgaccagggaaaagtgtaaataacaaaaagttaggattatcagatggtaaactggggaccaaggaaaagtggacaggaagattacttatataattaaataatataattataaggacttacaattcactccccaatcctaataacgcatcattgttaggctacttgagaagaaacagtacatttcaggacaattgtgatgtagtatgaaaaaacatcctttgtaaaagtttttcatttgggccagggtggttcatgactataatcccagcaatttgggacgctgaggtgggaggattgcttaaagccaggtgttctagcccagcctgggcaacatagtgaaaccccacctctatagaaaaaaaaagttttcaatcatacttatttaattaaaagtagacacttggaaacaaaggaaaagagaccctcttgctttttactatacttctattttataaggtcaatcatttcctcattacctttaacttcttttggggggagataataaagataaaagagaagaaagtgaaacatagaataaaactaaaagctatgacattataacttttagaagttagaagtaaaggaaatagaatgcaataagaatacacgtgaagctgatatttcaagcctctttatactacgtcttctgccatcaccaaaaatagcttccatttgtatgattttctatgtattattttatttggccctcatttctactagagtaagcagagaagatattattatgaccattttatgaaaatggaaactaaaaacgtgacgggattgagcaagattatctctgccctttgacaagtaaaaggtacttgatttggatggataaagctcaaattaaaagaaataacagactaaagatatagtaagtatatttaatgttttttaaaagtccttttaaaatgggaagaaagtatcactatcagtacactgccgatttttctcctaactagctccttatttggagctgatttagtcaccattactgcagttctgcagcagaggcgccgggtgccgctcttggctagtgctgtgcaaaatattggctcctcccgctgcagccagctcggaagaaaagtgcactctctatcaggcttcctgcagcggagacacccattagagaacccaagcacaaagacaaagcaaatagttggtcctgctcggagaactcttgggattatttaaagatctcctctcctcggatttagaaaggcaaaggcgcagagagcgggatgggaaatagctccggatggaggggcccagcagggcagaggcgaatgctatttctcttcctgctctctttgttagaccaggttctctccgaaccgatccgctacgctattcccgaggagctggacaggggctcgctggtagggaacctcgccaaggacctggggtttggcgtgggggatttacctactaggaacctgcgggttattgcagagaagaaattctttaccgtgagccccgaaaatgggaacttacttgtgagcgaccgtatagaccgagaggagatttgtggcaagaagtcgacgtgtgttctggaatttgaaatggttgctgaaaagcctttaaacttttttcatgtaactgtgctgatccaggatattaacgacaacccaccgacctttagccaaaatatcactgagctggaaatcagcgaactggctctcactggagccacatttgccctggaatctgcgcaagatcctgatgtaggtgtcaattcgctgcagcagtactacctcagccctgatccgcacttctctttgattcagaaggagaacctggatggcagtaggtacccagagctagtactgaaagcacccctggacagggaagagcagccacatcaccacctggtcctcacagctgtggatgggggcgagccctccagaagctgtaccacccagatcagggtaattgtcgcagatgcaaatgataaccccccagtatttactcaggacatgtacagggtcaatgttgcagagaacctgcccgctggctcctccgtattaaaagtgatggccattgacatggatgagggcatcaatgccgaaatcatctatgccttcatcaatattggcaaggaagtgagacaactgttcaagctggacagtaaaacgggggaactcaccactattggagaactggactttgaagagagagatagctacacaattggggtggaagcaaaggatggtggacatcacactgcatattgtaaagtacagatagatatttcagatgaaaatgacaatgccccggagataaccctggcttctgaatcccaacatatacaagaagatgctgagctggggactgccgttgccctgatcaaaacacatgatctagattctggatttaatggagaaatcctatgccaactaaaaggaaacttcccctttaaaatcgttcaagataccaaaaacacatacaggttggtgacagatggagccctggaccgggagcagatcccagaatacaatgtgacgatcacagctaccgacaaaggcaatccaccgctctcctccagcaagaccatcactctgcacatccttgatgtcaacgacaacgttcccgttttccaccaggcctcctacaccgtgcatgtagctgagaacaatccgcctggagcctccattgcgcatgtcagagcctcggatcccgacttgggacctaatggccttgtctcctactacatcgtggccagtgacctggagccgcgggagctgtcgtcctacgtgtccgtgagcgcgcggagcggggtggtgttcgcgcagcgagccttcgaccacgagcagctgcgtgccttcgagctcactctgcaggcccgcgaccagggctcgcctacgctcagcgccaacgtgagcctgcgcgtgttggtggacgaccgcaacgacaatgcaccgctggtgctgtacccagctctggggcccgaaggctctgcgctcttcgatatggtgccgcgctctgcagagcctggctacctggtgaccaaggtggtggcggtggacgcagactcgggatacaacgcctggctgtcctaccacattgtgcaggccagcgagcccgggctgttcagcctgggcctgcgcacgggtgaggtgcgcacggcgcgtaccttgggcgacagggaggccgcccgccagcgcctgctggtcactgtgcgtgatggaggacagcagcctctttcagccaccgtcatgctgcacctaatcttcgcagatagcttgcaagagatacaacctgaccttagcgaccgccccactccctctgaccctcaggcggagctacagtttcacctagtagtggcgttggccttgatctcagtgctcttcctcctcgcggtgattctggcaatctccctgcgcctgcgatgctcctccagacccgccactgagggctactttcagcctggtgtctgcttcaagactgtacctggagttctccccacctacagcgaaaggactttgccttattcctacaatccgtgtgctgcctcacattcctcaaacaccgagtttaaatttctcaatataaaggctgaaaatgctgcaccacaagatcttctatgtgatgaagcctcttggtttgaaagtaatgacaatccagaaatgccttctaattcaggcaatttgcaaaaggtgagtttcttcaaacctttccttccataaatataattgggtttcaattcattgatttagagataaaaagaatacagattaaatattccctgattacattattttattgattttctggtgtagagtagggtgtctaggaaattctttgtagaatttcctgtagaatatctgtgttgcagttgttctttcatagaaagcctccttttgatagtcttgaaacttttcttaatcctaatacactataatctgaaacatttttaatacagtattatctcacactgtcattttcagacatatctatccagaattagacccaaatcctcacaattaagtggtttacttagttttaatgcagtcaatcctaaaatatatgaaacattatgtatatcttaacacatttttaatgtaacctgtatataatatttttacttccctttgcatgtttttaaaagtatacacagatgttgcctatgtcagggcagtttttaacttctatgctaatcaaaagaaataatggcatctaaaatggcaactcttgtaatgggcactgtaatgaattggttcaaaatgtgtttgtgtagcatatgcctgtagtcccagctactcgggaggctgaggtgggaggatcccttgatcccaggaggtagcagctgcaatgagctataattgtgcccctgcactctagcctgggagacagagcgagactttgtctccaaaaaagtgtttgtggttgttggtacccttactgaaaatgggactagcataaatggtggtgaaatgtgatgataattcaaaatttacagaagattgtaatattatttctgttccccaaggtcctaagagatattttcataaaaatgaatggtaaacttcagagaacatttaaaattattcaaaataatctcttacactcttctaaatgcttcattatcttggggagggaaatattatgagtgtcatctctgcagatttagcagaaataaaatcctctgtgtgatagtttcacaaaacgatgcagtattaagttaggactctaagcgtcgctgttgaccaacctgggcaagaaaatcaacggaaactcaagttacatcctccaacaacaaagcaaattagacgggaaagcaggaaagctgtgcagaaattctgacctgaaacgcttcgcatccggtctctgcttgttgaaggaccttcaccgctatttctgagaagagcaaaagtgatgcagatctgttcttcctcttcttaatcccagagaagttcctaataagccagtaatggcgcctccgcagaggcatccgcagcgcagcgagcaggtcctgctcctcacgctcctggggacgctgtggggggccgcggcagcgcagatccgctactctattcccgaggagctggagaaaggctccttcgtaggcaacatcgtcaaggatctgggactggagccccaggagttggcggagcacggagtccgcatcgtctccagaggtaggatgcagcttttctctctgaatccgcgaaacggcagcttggtcaccgcgggtaggatagaccgcgaggagctctgtgctcagagcccgcggtgtctggtgagttttaacatccttgtcgaggataaactgaatctttatcccgtggaagtggaaatagtggacattaatgacaatacaccccgattcttaaaggaagaattggaagtgaaaattctcgaaaacgcagctccatcctctcgttttccactaatggaggtctatgaccctgatgtgggaatgaactcccttcagggatttaagctcagtggtaatagtcacttctcagtggacgtgcaaagcgaagcccatgggcccaagtacccggagctggtgctggagggcacactggaccgggaaggagaagccgtttaccgcctggtccttactgccatggatggcggcgaccctgtccgctcaagcgtcgcccaaattctggtaacagttctagatgtgaatgacaacactccaatgtttactcagcctgtctaccgtgtaagtgttcctgaaaacctgccagtaggcacaccagtgttggcagtgactgccaccgaccaggatgaaggagtccacggggaagtaacttattcctttgtgaagattacagaaaagatctcacaaattttctgtttgaatgttttgactggagaaatttcaacttctgcaaatctagactatgaggactcgagtttttatgagctgggtgttgaagcccgggatgggccaggtcttcgagacagagcgaaagtcttaataactatcttggatgtcaatgataatgtaccagaagtggttgttacatctggaagcagaacaattgctgaaagtgcacctccaggaacagtaatcgccctttttcaagtgttcgatcgagactctggcctgaatggcctggtaacctgttccatcccgagaagtctcccatttgaattggaaaaatcagttggcaattattatcgattagtgacaaatgcagctctagaccgggaagaggtattcttgtacaacatcactgtgacagccacggacaaaggaacaccacctctgtctacagaaacaatcatctctctaaatgtggcagacaccaacgacaacccgcccaccttcccccattcatcctactcagtctatgtccttgaaaacaaccccaggggtgcctccatcttctctgtgaatgcactggaccctgacgtggaccagaacgcccaagtctcctactcactggcagaagacaccctccagggggcgcccctgtcctcctacgtgtccatcaactccgacactgggattctgtacgccctgcgctccttcgactatgagcagttgagagacctacagctgtgggtgacagccagcgacagcggggacccgcctcttagcagcaacgtgtcactgagcctgtttgtgctggaccagaatgacaatgcgcccgagatcctgtaccccgccctccccacagacggttccactggcgtggagctggcgccccgctccgcagagcccggctacctggtgaccaaggtggtggcggtggacagagactcgggccagaacgcctggctgtcctaccgcctgctcaaggccagcgagccaggacttttctcagtgggcctgcacacgggcgaggtgcgcacggcgcgcgccctgctggacagagacgcgctcaagcagagcctagtggtggccgtccaggaccacggccagccccctctctccgccactgtcacgctcaccgtggccgtggccgacaggatccccgacatcctggccgacctgggcagcctcgagccctccgccaaacccaacgattcggacctcactctgtacctggtggtggcggtggccgcggtctcctgcgtcttcctggccttcgtcatcgtgctgctggcgctcagactgcagcgctggcacaagtcacgcctgctgcaggcttcgggaggtggcttagcgagcatgcccggctcgcactttgtgggcgtggaaggggttcgggctttcctgcagacctattcccacgaggtctcactcactgcagactcgcgtaagagtcatctgattttcccccagcccaactatgccgacacgcttatcaaccaggagagctatgagaaaagcgagcctcttctgataactcaggatttacttgaaacgaaaggagaacccaggcaacttcaggtgagtttctttccgcctaagcgggaagagtaatctgatcttcccgcaacccaactaatcagacaggctcatcagctagatcggctgttatagaagcgaacctcttttggtacaggaagattcgtgattttgtaaagtggaagactcccttgttcaggtgagggtatcgtttttttttttttttttttttgagacggagtctcgctctgtcgcccaggccggactgcggactgcagtggcgcaatctcggctcactgcaagctccgcttcccgggttcacgccattctcctgcctcagcctccctagtagctgggactacaggcgcccgccaccgcgcccggctaatttttttgtatttttagtagagacggggtttcaccttgttagccaggatggtctcgatctcctgacctcatgatccacccgcctcggcctcccaaagtgctgggattacaggcgtgagccaccgcgcccggccgagggtatcgtttttattggttgacaggaaaattcaagattgtctttgattagtgcttagttttcttagccctttgcagagagtcacataattctaatgtttttcttttatatcaaaagaatgttctgaagtcttaattttgtgggggaaaataatgcatgtcctagtttttctttacctttctcttcttggcaaactatttgtgtcttggattgagtacatctcgtttcttaggttttttcctactatgtgacatttgtaaggttctttctttttctaatgtgggaaaaaaaataaccttaatttaggtcagtgttaaagatcaagatcttggttttagctagcatggtggttcacgcctgtaatcccacctcttcaggaggctgaggcaggaggatcccttgagaccaggagtttgagaccagcctgggtgactctgtctctaccaaaaagaaaaaaaagtagccagatgtgtggcgtacacctgtagtcccagctactcgagaagctctgataggaggattgcttaagtccaggggtatgaggctgcagtgagatataattgtgtcactgcaccctagcctgggagacagaatgagactttttctctctctctctcaaaaaaaaaaaaagattttgttttttctcagtgttacttgataactataaacgacagacgttcatacaagagatctttcacctttactacttaggaatcaaaaattatttttgaaaagataagaatcattggtaactgcagcaggggacaccagatctttggtgttaaaagacctgaataacattcctgtaactatctgttatttacttgggccagttacaatcgccattatcttccaattaaaattaagatttaaaagacttctcttatcagagataggatccccctctgttgcccagtctggagtaaaaatccacctgtaactgctgcttatagagtgtgtatccagggcaacttgaatctatgttcctgggttgcaatcctaaagcttggctcaaataagctctacttatattattttttaaaacaagactttccttatctatctgactcaaattctaagaaaataattttataactttttttcaaactctaaagcagcatagtgaacacgtatttgttgacatcaccattattataattattgggttgttaacaataactaagcaccgatgctgtgtgcctactacagtgtcttttgcatactgtgtgcctgatagtatttaagagtgaaaatggccgggtgcggtggctcatgcctgtaatcccaacactttgggaggccaaggcaggcatctcacgaagtcaggagttcgagaccagcctgaccaacatggtgaaaccccgtctctactaaaaatacaaaaattagccaggtggggtggcatgggcctgtaatcgcagctactcgggaggctgaggcaggagaatcgcttgaacccatgaggcagaggttgcagtgagccaagatcgtgccactgcactccagtctgggtgacagagcgagactctgtctcaaaaaataataatgataattaataaataaagagtgaacatgaattttaaaacatgctcggtagtgtctgcttacaggacatatctctaaaaatagatgactgactggtgaatgggagaacaaatgttaatgaggttcaaataaaaatttaaatattttagcattttaacccagacaataaggctttcatcatataggaactctttattgaaatatttcaagaaaaaagggattatcatttagaagactgattagtcttatttattatgactgaaatgtgcaaacagaatcattgtttcatgaacagaaaacagcagagtttttgactgtcaatgatgttcgaatagaaaatggatcactaaggagataggagattctgttatcgacagtcttcaaaagtaagttgatggccctggaatgaatggagtacaggggattctctaatttgatgacttgttgaactacattatagtcaagatttttctccagtcatgagttggaagattctacaatctggtggtattatagaatggattggccacttgtgcatctgaatttgttatgaatgtgtaagaaaaaagcaattgagaagataccttgaaaataaatgagaacctcctttgtaacctgactttgtcagtcttcttaaagataacattgagttgatgtgtttttaaataagctgctaagagtaatatgtgtttttctgaaccaatattgtggtatttacatttaaggaattgttatagatttatttatttcaagtttccaaaggtatatacctaaacaagagatctaatcatacacatcttcaaagctcattttcttgtatctttgtgatataatttgataaaataacaattttaaacaacttgaatcttggatattagtctcatgagttagatgggctgttatacatatgattatttcataaactctgaaagtgtgaatgttattttactatactaccaatttgggatgttaaactacatcttgagcatttgttgttatagggaaagctcactaactacttttcatggagatcaggctggtttattttattctcttattacctgtgaccatttcatttaaacaaataaaatatttctctgatggaaaaactaccaacttctactctcacaaaagtcattcactcatgtggactgaccaactgttaaacatcctggcagtcatggaatttgctaagttatggctaaatgaggttctttaatccacctgcaatacagatcattaataataagataggctatctgaggttttgagagttcagtatagaattttgaagcatcaggaaaaaaaactaccaaattattgtcttattcttattttatggtctgtgaaagcctcttttttttttttttttttttttttttttttgtcagagtcttgctctgtctcccaggctggaatgcagtggtgtgatctctgctcactgcaacttcctcctcctgggttcaagcgattctcctgcctcagcctcccaagtagctgggattacaggtgcatgccaccatgcctagctaattttcatacttttagtagagatggggttttaccatgatggccaggctggtctcaaactcctgaccttaagtgatccacccgcctcagcctctcaaagggctgggattacaggcatgagccactgagcccggcctgaaaggcattcatttctgatcaggcttctgttgaggtggcaattgtcaaaggggaaggagtaaaatctcagaggagaaacattggaagatacctatatctttgcttgagaatgaaaatctaaatggaacttcaaagaactgttttgttgtttgttttttagaaaaaaaagtcccaaaaaagaaaagagagaagataatcaattcgatgcccaggaagccaaatagactttacatagaattctttttaatgcaaccaaacaaatggtcaggattcttcccaatatctcagtcaacaataatatacactctttaaactatgaaatgatttcaatttgatacaatgagcttatgttagattttattaaacatatcttggcggtctagtaaagatctttaatatttaattttatgatgttcgataacttagaaaatgtgaatgctagagacaatgaagccatttactccatagggtatgtatgctttgtgttcggagtagtctataatttaatttaactagctcttatttccttttctccaaagaaggtaccaagacactataaattaattgagacttttttaaaacagtagaataagaaacaaatgtgagatgaaactatgaattttgaggcatcaggtaaaaatggatcaagacattgagagctataacctccaaacatgaaagtttgtttgaaaatatctacaagtgcttacattgtttaataatcatacactttgcttgcctcaacaagaagttcaaaagtactattaaacaaatagaatttaactccagtttacagaattcatctataatacctctattagttcctttaaacaaaatttatctactttgtgaatgcaaagataactatggattattttgatagatcaaaacagaatgtccttcaaagtgttccctgtattctggagcaatgccaccagaaagcagaaataggttacttaggagcctcccacaaaacgaagttaagctttcttagtgttagttctggattctcctcctggttccaccaactactctccaggacctagaagaatttacaaaccaagactgtttcttgccaggtctttattccagagcaggtcattctcttttattctgcaactatgtgaaaggagctttcttttctttctgctagcagagggtagcctcggatccatcaataatttagttttactctatcaacatcagtggagagacgagtacctctaaggatcctgtcaggacagtcctgcattttgctcaaatgctgtctagagatccctgttttctcaattacactagaatagagtaggatgaagatttgaattgcatactaggatgaagacttgaattgaattgcataatgaaaagaatcagccaatccattatccagtttcttatgaattcacagcccagtaggatctctgcagatttctgccttctgtagaaaatgggttgcttctatagctgattgctgcagccaagacaaacaacgatttctttctttttttctcacaagactgggagtgagaatatttggattccgacattgttctactactatataatcaataatcaggaacaaggcaaggcaattccctctttctttctttctttctttcttcttcttttttttttttttttttttttggcagagttttgctcttgttgtccaggctggagtgcaatggtgtgatctcggctcaccacaacctccacctcccgggttcaagcgattttcctgcctcagcctcctgagtagctgggattacaggcgcgcgccaccacgcccggataattttgtatttttagtagagacggggtttctccatgttggtcaggctggtctcaagctcccgacctcaggtgatccgcccgcctcggcctcacaaagtgtgggattacaggcgtgagcaacagcacctggccccccctctcattttttaaacggttaaaatgaaggtgttagaccgtctctaaggttctatacaatcaaaaatttattaaaataggtctatatattttacaacaattttgactttctgaatcttgcatcatggtgtctagaacatatgtgttcaattaatactgaattaattaaaatttatatacactgatgtaaatattttctaagtaaaatctttcatatgtatttaaataaaatttacctttttgccttcaataactgattttcccatgtgcaataacgtgtgagtcagtgcccaaaagagtcacttgaaagttgcaaggcaaagcagttttttaaaaattatctaagattatcaaacaccggtccatgaacactgttgcattaattcagtgtcttaaaatggatttttaattatcagggatatctagagcaaagaaatctaacagggaaattttgaaagatgaaacaattttctatgaaatcagtgtattgtgtgcatcaatgtggtgcagtaacttagtaaggactcacagcgccgctgttcaccaaccagggaaaaatggtgcgagagatcccacagaaaccaccgagttttacagcacagagaaacgacagattgcgataagccctcttccaggctgcactaaactcaagcctctatcctgctggattctgagctccccttcctaagacagaggggtccacccggatacacccgcattctgaagcacttcccgagatcggcgcctaagcaagagaagcaggacgactatggcggctcagccgaggggcggggactacagaggattcttcctgctctccatcctcctggggaccccctgggaagcctgggcaggacgtattctctactccgtgtcggaggagacggacaaagggtcctttgtgggagacatcgccaaggacctggggctggagccccgggagctggcggagcgcggagtccgcatcatctccagaggtaggacgcagcttttcgccctgaaccagcgcagcggcagcttggtcactgcgggcaggatagaccgggaagagatctgcgctcagagtgcgcggtgtctggtaaactttaacatcctgatggaagataaaatgaatctttaccctatagacgtggaaataatagatattaatgacaacgttccaagattcttgacggaagaaataaatgtaaaaataatggagaatacagctcctggggttcggtttccgttaagcgaggctggggatccagatgtgggcacgaactccctccagagttaccagctcagccccaatcgccacttctccctggctgtgcaaagtggagacgatgaaactaagtacccggaactggtgctggagcgggtgctggaccgggaggaagagcgggttcaccacctggtcctcacagcctctgatggcggcgacccgccccgatccagcaccgcccacatccaggtgacagtggtggatgtgaatgaccacacgcctgtcttctctctgcctcagtaccaagtaactgtccccgagaatgtgccagtgggtacaagactgctcacggtacatgctatcgacctggacgagggagtcaatggggaagtgacatattcttttcggaaaataactcctaaacttccaaagatgtttcatctgaactcgcttacaggagaaatatcaactttagaaggattagattatgaagaaactgccttctatgaaatggaggttcaggctcaagatggtcctggtagtctgacaaaggcaaaagtactgatcacagttttagatgtaaatgataatgctccagaagtgactatgacgtctttaagtagctcaatccctgaagacacacctcttgggacagtcattgctcttttctacctacaagacagagattctggaaagaatggtgaggtgacctgcaccattccagaaaacctaccttttaaattagaaaaatcaatagataattattatagattggtcacaaccaaaaacttggaccgggaaacactctctttgtataacatcacactgaaagccacagatggtggaactcctcccttgtccagggaaactcacatattcatgcaggtggcagacaccaacgataacccacccaccttcccccactcatcctactcagtctacatcgctgagaacaaccccagaggggcctccattttcttagtgactgcacaggaccacgacagtgaggataatgcccagatcacttattccttggccgaagacaccatccagggggctccagtgtcctcctatgtctccataaactctgacactggagtcctgtacgcgctgcaatcctttgattatgagcagttgagagaactacaactaagagtgactgcacatgacagcggggacccgcctctcagcagcaacatgtcactgagcctgttcgtgctggaccagaatgacaacccgcccgagatcctgtacccggccctccccacagatggttctactggcatggagctggcaccccgctccgcagagcccggctacctggtgaccaaggtggtggcggtggacaaagattcaggccagaacgcctggctgtcatacctcctgcttaaggccagcgagccaggactctttgcggttgggctgtacacgggcgaggtgcgcacggctcgggccctgctggacagagatgccctcaagcagagcctcgtggtggccgtccaggaccacggtcagcctcctctgtcagccaccgtcacactcaccgtggctgtggctgacagcatccccgaagtcttggccgacctgggcagccttgagccctccgacggtccttacaactatgacctcacgttgtacctggtggtggcggtggccacagtctcctgcgtcttcctagccttcgtcctcgtactgctggcgctcaggctgcggcgctggcacaagtcacgcctgctgcaggcttcagaaggtggcttggcgaacgtgcccacctcgcactttgtgggcatggacggggtgcaggctttcctgcagacctattcccatgaggtctccctcaccgcggactctcggaagagtcacctgatcttcccccagcccaactatgtagacatgctcatcagccaggagagctgtgagaaaaatgattctttgctaacatccgtagattttcaggaatgtaaagaaaacctgccaagtattcaggtgagcccagcccttcctttatttccatgaggaatttatttgcatgatatttctctattattttgcaaaacaaatgttttgaaaatagggatttaaaaaactttatagaggtaaaaatgagtttaccagtttccttcagtggtgacactttaatatagaacacataggatatagtatttctttagtgaaagcctatggacaagattatgaatatgtggactatcacattttataatttccacctactttccaatctatgttccaacctactttcttaactcatatattttatacattggaatgaatcgagtctttcatattgcacaaggttagcaggaataaaacacacctcagctgtcttctcaggattctctttagcattcaaatatgtaaaaggttctgaaagatttcttccatgtgaagatttttttctgtggctgattctgcctccatgtacctcagcttggtggtcctaaaaaatcttgattgcttcttgacctatttacagtataatcatttattaatggggtggtagtagaaggttggatttatgcctaaagaatgaaatgtgtgtgtatcacacttcactaagatctatatcaaagacagacatcaagtctaatgccacactaaaggccatcggacaaaaccaataaaatatgtcaaataaaatgtcattttaagtgttgtaattggcatttgtgacataggcaattacatgttttaacagagaattccagtatgttgttttagtggtacagccagatgaagtgtgtctgtgggctatcaaagtgggagattggggatactggctttgtttcaactgtctcacgtactcaaaccttagaccatcttatgtacacagatcctagaccagtagttgattttatttattaggtctactgaaaaattcagttggaaataacccaatctgggattaactacttccatattcttttgtataacattttagtaaagctcagtatatcaagtgattgtcatccagaaggggtggatgacaaggtaatcttgattccagagacctttgagtattaattaaaaacacacttttagccaggtatggtgttgcaagctgtagcccacctgcatgggaggctgaggcaagaggacagcttgaacccaagaattggaggcccacctagataatataacaagactctgtctcttcaaaaaaagactctttttagactagtgttgtatttggtagtattttgcacatgatagactctgtacaatagtgtgggggatacattttttttttttgacatggagtctcgctctgtcacccaggctggatacattttacaagttctgcagtgttcacatttcagatgtacaatcacttggggtagaagacaatgttgctgacaccaacaatgttactgagggaagatcctatggcagaactacggttataaggtattttgtaaaagaaaatctcctgaccaaaatttattagatgcataaaattgtttttaagcaatggagagacataatcactaaactcagtgagctattgcaatcaaactttccagggattgtttccttcaattcagaggtcaccaaggaatgtaaaataagtgcagaggtaggaagcagtgcttcagtgcagcagatctcagtgactttgtgttttgaggctatgtattatccccctgataactttgaagatgaatgttgtatttcataaccagtaaaataattgtgtaatgaggagaggagtaggctactgcctgtgatcatcgaaatgagaatcacataatattcctgtaatgaaatcactgaaactattgggaagggggtgtatttgaagataagtataaattgcaccttctaaaaggcaattttggtattactgatactctccggaaaaagttgaaataaatcaacttggaggtacttagaaaagtggagaaaatgttaggaacaatgaaagaaagataaaatgtatccagtatatttctaatgagtaagtatggaaaattactgtactctgagacggtttaggccaagtctgtgttatggctatctttatatagatagtgcatgtttgaagattggggaaagcttatgtcaataaatgtttatgtacttaatctacatgatttgcctaaaaatcctcaaagttgggatgaaggcattcctaagagtacatttttagacgtcattaaatatacagacgtatccacgtagtttttgttctttcagttaggcacacaattataattattgcactggttaacttgaagcagcagaggctgtagtttcctagtgctgactctgggcgccgctgttggccaaagtggagagcttggcgctccagatctcctcgcgcagccgcagcgcgctttccagggcagccccagctcagactccccagcgccagcctttacaccgcttcctcctcggaaaaagaagaattttttcttgaactggaactgcaactaaagtccgttcggagatccaaaaatctgcaatacagaggttatttgtaacccggcgtctccaggctggtgagcaagctgaggagagcaagagggatggggagcggcgccggggagctgggccgggctgagaggctgccagtgctctttctcttcctgctgtctttgttctgcccggcgctctgtgagcagatccgctacaggattcccgaggaaatgcccaagggctccgtagtggggaacctcgccacggacctggggttcagcgtccaggagttaccgactcgaaaactgcgcgtcagttcggagaagccttacttcaccgtgagcgcagagagcggggagttgcttgtgagcagcaggctagacagggaggagatatgcgggaagaagccagcttgtgctctggaatttgaggctgttgctgaaaatccactgaacttttatcacgtgaatgtggagatcgaggacattaatgaccacacgccaaaattcacgcaaaattcctttgagctgcaaataagtgagtctgcacagcctggcacacgatttatattaggatctgcccatgatgcggatattggtagcaacacactgcagaattaccaactcagtcccagtgatcatttctcactgataaataaagagaaatcagatggcagtaaataccctgagatggtattgaagacacctttggacagagaaaagcagaaatcctaccacttgactttgactgccttggactttggagctccacccctaagcagcactgcacagatacacgttctagtgactgatgccaatgataatgctccagtgttcagtcaagacgtatacagggtgagcctttcagaaaacgtgtacccggggaccacggtgctacaggtgactgccacggaccaggatgagggtgtcaatgccgagattactttctctttcagtgaagctagccagatcacccaatttgacctgaactctaacaccggggaaattactgttttaaatacattagattttgaagaagtcaaagaatattccatagttttggaagcaagggacggtggaggaatgattgcgcaatgcacagtggaggtagaagtcatagatgaaaatgacaacgccccagaagtgatattccagtctctacccaacctaattatggaggacgccgagctgggaacacatattgctttgctcaaagtccgtgacaaggattccagacacaatggagaagtgacttgtaaattggaaggtgatgttccatttaaaatattaacttcttcaagaaacacgtataaattagtgacagatgctgttctagaccgcgagcagaatccagagtacaatataaccgttacggcaacagatcggggcaagcctcccctctcctccagttccagcatcaccctgcacattggtgatgtaaatgacaacgctccggttttctcacagtcttcctatatagtccacgtggccgagaacaacccgcctggagcctctatttcacaagtcagggcttctgatccggacttggggcccaacggccaagtctcttactgcatcatggccagtgacctggagcagcgggagctgtcatcctacgtgtccataagcgcggagagcggggtggtgttcgcgcagcgcgccttcgaccacgagcagctgcgcgccttcgaactcacactgcaggcccgcgaccagggctcgccagcgctcagcgcgaacgtgagcctgcgcgtgttagtggacgaccgcaacgacaatgcgccacgggtgctgtaccccgcgctgggtcccgacggctctgcgctcttcgatatggtgccgcacgctgcagagcctggctacttggtgaccaaggtagtggcggtggacgcagactcaggacacaacgcctggctgtcctaccacgtgctgcaggctagcgagcccgggctcttcagcctggggctgcgcacgggcgaagtgcgcacagcgcgtgccttaggcgacagggacgccgtccgccagcgccttctggtcgccgtgcgtgacggtggacagccaccactctcggccactgccacgttgcacctggtcttcgccgacagcttgcaggaggtgctgccggatatcactgaccgccccgacccctctgacctccaggctgagctgcagttttacctagtggtggccttggccttgatctcagtgctcttcctcgtggccatgattctggccattgccttgcgcctgcgacgctcctccagccccgcctcctggagctgcttccagcctggtctctgtgttaaatccgaatccgtggttccccccaactacagcgaggggactttgccttattcctacaatctatgtgttgcacatacaggaaagacggagtttaatttcctaaaatgtagtgagcagttgagttcaggacaagacatactttgcggtgattcatctggggccttatttccactttgtaattccagtgaattgacttcccatcaggtgagtttcctttaagtataatttaatgctcattgcctacccatttctccatattcacaagaaaatatacatatttgcaggaaaatatataatttttagatgtcatggatcattttaggaaagttgtagtcagttaaaaagctgtcatatcattctacaaaggaggagtaaagtaggagcaattgtgtggcccaacatttgtttgttttttagccaagcttagatttataaagcaatgagggtgtggttttaaccacaaagtgaaagtgttagacagttgttggctctctcctaaaaagtgaatgagatttttcctatacattttccttcttgttgactaatatatgatgaatacttttttcagcttggatataccataaatataaaaataataaagccaaagaatttaagctaaaattcaacacttttcttaactaatttaactggtatggtctccatagtagtccactgttttgtttcctgtgttaacttcccttttgtttcaaaagctcttagaataaggagtcaactggatttttatgtccatggaccccttgtgattatatgcagtgtacgctgtgtgtgcgtgtgtgtgtgtgtgtgtgtgagagagatccttttacttagaaaaaggtctactatgctcattagaagatcaaaagcagattctccttacttgtaacataggagtttcaggattaatctgtattcaagctcattctatatccttcatcaaagaaaagacaatgttttgtgtctgttgtccctctcacacacagccctaatatataatgtgtaactgccttatctgcagccctaaactaatatagctagaggtcttctaatcattctcctacctctaggaaagaaatatagtcttgaaaactgccaatctggtgtgcatacaaaatatatacaaaataccaaggaacattatatgagccttttgctaggtatatctaagcaactgcttcagttaatggccactttacaaattgctgaaagaaggaaacgtctttcgattcttttttttttctttttttttttttgagacagagtctctgtctgttactcaggctgtagtgcagtggcacaatgatagctccctccagcctcaaactcctgggctcaagcattccttctgcatcagcctcctgactagctggaactcaggctcatgccaccagacctggctaatttttctgttttcagtagagaaaatattttctttcactaatttaactggtatggtttccattgtctacccagttttccatatgcataagaaaatatattcacaggaaaatataaagttttcagatttcatgagtggttttaagaaagttttagtcagtgaaaaaactatcataccagtcttcaaaggaagggtgaaataagttcatctgctacgttgcccaggctggtcttgaagggaaacagacttttttgtagtcatacttatcctttggcttcttagtaagtattatatagtcattactttttgcagttttttagatcaaagtgttaatgtaggtaaagttaattttagaatatatgtaaaagtcaagtctgctttaaatttaatcatctctttggtgaaagggatgggatggagctttgctttttatcatatattcatctgtacctttcaagtattcaaatagaaaaatataaacaatgtaaataaaatagcaaaacaatgtaatatctcataaaactgcaatggtaaaagcatttatcctattgaaattccacaatttttatttgaaaatattatcgacatgtaattcaagtggcatttagaagaataatttaaaagcaacaactctatagaaagcttgtaaaatgattaagtagtttaaaccaaataaaacaatttctgagtcagtcatctccagtaggtctattttagtctcaagataaattcatttctggtgacaactgaagttcttagttatttgttagtatatattggagacatttacaataaagcttagagcacaatgggaaatgaaagtatcatgttttttttaagaccaaatgtattgcagaaatgtgagtaatttaatccgatgctacaatctgatcattctgatctaatctgatcatttaataacactaaataaaaccttcatctcacattctttggctgtttcttttaaaatatgggtttacggataaatcaaataaattcaaaacaaagtaataagcaaatgatttttttttctcagtaatctagtagagtattacatttagaagtaatctgtatctcagtgcagtaactatttaggactgtaagcgccgctgttcacctactggaagacaaatgcaaccgaaaacactcagatctcacacctcacgaagacccgcagatgccacaaactaactgctggactgcagcgaaacccgacccctgtttggaggcactccaggtttccggaggattgtcatctccatagctgcggcaagaaactaaataagacccatttatgcacagtgaagattctgagaggattctgcagcaaaacaacaatggccgctccacagagtcgccccagacgcggcgagctgatcctgctgtgcgcgctgctgggaacgctgtgggaaatcgggaggggacagattcgctactctgtgccagaagagacggacaaaggctccttcgtgggtaatatctccaaggacctggggctggacccccggaagctggcgaagcacggagtccgtatcgtctccagaggtaggacgcagctctttgctctgaacccgcgcagcggcagcttgatcaccgcgggcaggatagatcgggaggagctctgcgctcagagcccgcggtgtctgataaatattaacaccctggttgaggataaaggaaaactctttggggtagaaatagaaataattgatattaacgataataacccaaaattccaggtcgaagatctagaagtaaaaattaacgaaatcgcggttcctggagcacgttatccactcccagaagctgttgacccggatgtgggcgtgaactccctccagagctaccagctcagccccaatcaccacttctccctggacgtgcagactggagacaatggagccataaacccagagctggtgctggagcgcgccctggacagggaggaagaggctgctcaccacctggtcctcacggcctcggatggcggcaagccgcctcgctctagcacagtgcgcatccacgtgacagtgttggatacaaatgacaatgccccggtttttcctcacccgatttaccgagtgaaagtccttgagaacatgcccccaggcacgcggctgcttactgtaacagccagcgacccggatgagggaatcaacggaaaagtggcatacaaattccggaaaattaatgaaaaacaaactccgttattccagcttaatgaaaatactggggaaatatcaatagcaaaaagtctagattatgaagaatgttcattttatgaaatggaaatacaagccgaagatgtgggggcacttctggggaggaccaaattgctcatttcggtggaagatgtaaatgacaatagaccagaagtgatcattacgtctttgtttagcccagtgttagaaaattctcttcccgggacagtaattgccttcttgagtgtgcatgaccaagactctggaaagaatggtcaagttgtctgttacacacgtgataatttaccttttaaattagaaaagtcaataggtaattattatagattagtgacaaggaaatatttggaccgagaaaatgtctctatctacaatatcacagtgatggcctcagatctaggaacaccacctctgtccactgaaactcaaatcgctctgcacgtggcagacattaacgacaaccctcctactttccctcatgcctcctactcagcgtatatcctagagaacaacctgagaggagcctccatcttttccttgactgcacacgaccccgacagccaggagaatgcccaggtcacttactctgtgaccgaggacacgctgcagggggcgcccctgtcctcgtatatctccatcaactctgacaccggtgtcctgtatgcgctgcaatctttcgactatgagcagatccgagacctgcagctactggtaacagccagcgacagcggggacccgcccctcagcagcaacatgtcactgagcctgttcgtgctggaccagaatgacaacgcgcccgagatcctgtaccccgccctccccacagacggttccactggcgtggagctggcgccccgctccgcagagcgtggctacctggtgaccaaggtggtggcggtggacagagactcgggccagaacgcctggctgtcctaccgcctgctcaaggccagcgagccgggactcttctcggtgggtctgcacacgggcgaggtgcgcacggcgcgagccctgctggacagagatgcgctcaagcagagcctcgtggtggccgtccaggaccatggccagccccctctctccgccactgtcacgctcaccgtagccgtggctgacagcatccccgaagtcctgaccgagttgggcagtctgaagccttcggtcgacccgaacgattcgagccttacactctatctcgtggtggcagtggctgccatctcctgtgtcttcctcgcctttgtcgctgtgcttctggggctcaggctgaggcgctggcacaagtcacgcctgctccaggattccggtggcagattggtaggcgtgcctgcctcacattttgtgggtgttgaggaggtacaggctttcctgcagacctattcccaggaagtctccctcaccgccgactcgcggaagagtcacctgatctttccccagcccaactacgcagacatgctcatcagtcaggagggctgtgagaaaaatgattctttgttaacatccgtagattttcatgaatataagaatgaagctgatcatggtcaggtgagtttagttctttgcttgcttttaatttccagatgaattttatttggcataaattatgttttgaaaaacattgtgaagatagttgaaaataatttttaaggtgtatcacagagttttgggtttattttggtggtgttactataaaattgaactctaatagtcataggttattgtttcatttgcttttaaacgacttggaaaagattgttcaaccattttaagccttccagtattttattcctattatcactcattcacttaagaagtagctacccgtccatactggtaattttgctattgtttgtgtgtgtgtgtgtgtgtgtgtgtgtgtgtgtgtgtgtgtgtgtgtgtatcccaaactagaacttcagaaaattatcaagaagtctaaagccttgttattagcttagcaaaagtaaaatatatctcagaatttttagggttatgtttagcatttgaacctgtaactaggctcttgtagatttcttcactttaaacctcttttctgagccctgtttctgtaccagtgcccttcaaaactttaatacttcttaccatccttcaaaacatgaacaaactttaaagatggatcttggtgggagatgagactggttactaaatattaagtatgtgagtcagtggtcacctgggctccatgcccatggagacatgaaatctaaagcctagaatgtccattgctcccccaaacaaaaaacaaaagcaaaaacattagatctgaattaaaatgtaattttaaactgttgaaagtgacttttgtaaaatatgtaagaacatatttcaatacaattccaattagctgtttcggttgtgcattgatgtgaagtggtgagaatgttgatattaagaaccaatgtttcaggtacacaagttctaaataagctgatcaattcaattaaagttattcagtcttggctggacacagtgcctcatgtctgaaatcccagcactttgggaggctggggcaggaggaccgcttgagccccgggggtttgaaactgcagtgagctatgatcatgccactgcactccagcctaggtggcagaactagaccctgtctctaaaaaaactattattaggccgggtgcggtggctcacgcctgtaatcccagcactttgggagactgaggtgggtggatcacctgaggtcaggagttcaagatcagcctggcaaacatggtgaaaccccgtctctactaaaaactacaaaaattagccaggcatggtggcatgcgcctgtggtcccagctactcgggaggctgaggcagaagaatcacttgaacccgggaggtggaggttgcagtgagcctcgatcctgtcactgcactccagcctgggcaacagggtgagactccgtctcaaaaaaaaaaaaaactaatattaatagtaaaaactcggtataggctatccattattgtattcctgcataccttcttgtagcatttgaataaagctaatacctgaattgattgttgtaaggtagaagtagatgacccaataaatgtttgttattaatgaaaaggacatttcctaaggattgtgtagtgttctactgtatggtgcatattcagtggagtgggagttaacttcatagtttgtgtaccatttggatgcacatttgagaggacaacatattattggcactttgcaattttaaaaactcggatgaaagttgccctggtaggaaagaaaatccttactctccctaaaaatgttggctagttgtttttattaatctgacaaatggactaaagaaggttgaccaatgtccacaaatttatgtaaatgaacttatgagcttcatttatccaattccaaagtcatttcagataggataataatgcaatccactagaatatccctttgtaccttgtattgcagaatagataagcatttccccaataactcttaagaatgaatttatgtactgtaaaagatatgacataagagaagtattttgagatatgaagaagagcaacgtagtagggtatatcatttcttagctacatcatatgggcagtatacttgaatgaatatttcctgaagtagaagagtaaagaaaaattatttttataaagaatgttaatatagtcaggaagaggagatgtttggggattggtataaaattgccacaactttacaaaatagttttaaatagtatagatttccctaatatgtgtaatataaaacactagaaatattggggagttggaaatcatagaaatgaacagaagaatgataaaattgtttccatagctaataaaaaatgaatttttgaaatcagtatagtatgaaggctctgagagcaagaactgtatcatattaattattatattgccagtgacaagggcaatacttagttctagctaagagttcaaggtatgtttgcagaatggtgaaagaatggaccaatgtatgcaggtttgtataaaaacccaacgtgatatttctaacaatttggaaaacagagaaagataccttaaagaagttgttataattttttattaagtatatggacgtaaaaacttggcttgttaagttaggcacacaaaaacaattactgcactggttaacttgaagccgcagaggctgtagtttcctagtgctgactctgggcgccgctgttggccaaagtgcagagcttggcgctccagatctcctcgcgcagccgcagcgcgctttccagggcagccccagctcagactccccagcgccggcctttacaccgcttcctcctcggaaaaagaatcgtttcctaaactggaactggaactaaagcccgttcggagatccaaaaatctacaatacagaggttatttgtaacctggcgtctccaggctggtgagcaagctgaggagagcaagagggatggggagcggcgccggggagctgggccgggctgagaggctgccagtgctctttctcttcctgctgtctttgttctgcccggcgctctgtgagcagatccgctacaggattcccgaggaaatgcccaagggctccgtagtggggaacctcgccacggacctggggttcagcgtccaggagttaccgactcgaaaactgcgcgtcagttcggagaagccttacttcaccgtgagcgcagagagcggggagttgcttgtgagcagcaggctagacagggaggagatatgcgggaagaagccagcttgtgctctggaatttgaggctgttgctgaaaatccactgaacttttatcacgtgaatgtggagatcgaggacattaatgaccacacgccaaaattcacgcaaaattcctttgagctgcaaataagtgagtctgcacagcctggcacaagatttatactagaagtagcagaagatgcagatattggcttaaactctctgcagaagtataaactctctcttaacccaagtttctcattaataattaaggagaaacaggatggtagtaaatacccggaactggcactggagaaaaccttagaccgggaacaacagagttaccatcgtttagtcctgactgccttggacggtggacatccacccctaagcggcaccactgagctccggatccaggtaaccgacgccaatgataatcccccggtattcaaccgagacgtgtacagagtcagccttcgggaaaacgtgccaccaggcaccactgtgttgcaagtgtcagccactgaccaagacgagggcatcaactcagaaattacttattccttctacagaaccgggcaaatctttagtctgaattcaaagagcggagaaattaccactcaaaagaaactggattttgaagagaccaaggaatattcaatggttgtagaagggagggatggtggtggactggttgcacaatgtacagttgaaattaatattcaagatgaaaatgacaatagcccagaagttacattccattctctacttgaaatgattctggaaaacgcggtgcctggaacactaattgctttgatcaaaatacatgaccaagattctggggaaaatggggaggttaattgtcaattacaaggcgaagtcccttttaagattatctcttcatccaaaaattcgtataagttggtaacagatggaaccctagaccgagagcaaaccccggagtacaatgtcaccatcacagccacagacaggggcaagccgcccctctcctccagcataagcgtcatcctacatatcagagacgtcaacgataacgctccggttttccaccaggcgtcctacttagtcagtgtacccgaaaacaaccctcctggggcctccatcgcgcaagtctgcgcctcggacctggacttggggttgaacggccaagtctcctactctatcatggccagcgacctagagcctctggcactggcctcttacgtgtccatgagcgcgcaaagtggggtggtgttcgcgcagcgcgcctttgactacgagcagctgcgcaccttcgaactcacactacaggcccgcgaccagggctcgcctgcgctcagcgcaaacgtgagcctgcgcgtgttggtgggcgaccgaaacgacaacgcaccgcgggtgctgtaccccgcgctgggtcccgacggctctgcgctcttcgatatggtgccgcgcgctgcagagcccggctacctggtgaccaaggtagtggccgtggacgcagactcaggacacaacgcctggctgtcctaccacgtgctgcaggctagcgagcccgggctcttcagcctggggctgcgcacaggagaggtgcgcacagcgcgtgccttgggcgacagggacgcggcccgccagcgcctgctggttgctgtgcgtgatggtggacagccgccactctccgccaccgccacgctgcacttggtctttgctgacagcttgcaggaggtgctgccggatatcactgaccgccctgtaccctctgacccccaggctgagctgcagttttacctagtggtggccttggccttgatctcagtgctcttcctcctggccgtgattctggccgttgccttgcgcctgcgacgctcctccagccctgccgcctggagctgcttccaacctggtctctgtgtcaagtctggacctgtggttccccccaactacagtcaggggactttgccttattcctacaacctatgtgttgcacatacaggaaagacggagtttaatttcctaaaatgtagtgagcaattgagttcaggacaagacatactttgtggtgattcatctggggccttatttccactttgtaattccagcgagtcgacttcccatcctgagttggtgagtttcatttatgtctattctttttcattacccacccaattttctgtatttacatgaaactatcgtacattttcaagtccaatgagttgtcttagggaagtcagagctgctcagaaagctgtcctaccattctttaagaggagcagtaaattgtgagtttttatgtcgcataaaagaagtagccttatagatttacaaagtagtgagagtttgctcttagcttcctctctagcaaaaacatttggtgcgtttttttgtcctctttctcaaagctaatgaattttacctattcgttgtctcattctttaacatgtttatattttattgtatgtagataaaccattaaatttaatgtatgtaatcatttaattcatcttttaaagcaaagaaactgctagtagatgtctttcttcactgatttcactggtagttttcatctctttcttatgttcctcatatatgctttcttattcctacctaatggatttatgattttttgaatctcctaaaattttattaaaaatactatatgttggctgggtgcagtggctcatgcctgtaatcccagcactttgggaggccgaggcggttggatcacatggtcaggagttcaagaccagcctgggcaatatggtgaaaacccgtctctactaaaaatacaaaaattagctgggtgtggtggcgggcgcctgtaatcccagctactcaggaggctaagacaggagaattgcttgaacctggcaggtggaggttgcggtgagccgagatcactccattgcattccagcctgggcaacaagagcaaaactccatctcaaaaaaaaggaaggagaaggagaggaagaagaagaaaaatactacatgttatgtgtatgagagagaaagagagagactgattcactgaacttagaaggtccaaatcatccaaataattttctaagtttatccaggttttcttggatgcaaaatccttttccacctctatataattaccagaagaaacttacaaaaaaaaggaaatgctattgcctgaatttctcttgctcggaatcctgacatattcttgaagaaggggaaaaagacaccggatttgtcttatcgtttggagctttaaatataaatgactggatgttttctcaacatccttgtaggatggaaggtgaatacaggattattccatttttaagacaaaaactactagtcttgtgtacatacaaagctcccattacatggtataagtcttttgcttggtttcccttagtatgtgattcagtaaatgggttccttacaaagtgctgagatttcttataataccacttacttttaacctttcagtagttttctttgttgtatattttgtgttctttttcccaaattattatataagtttaagtgatgcttagaataatgtttaagaccactttaaaattgcataatttattgatgaaggattaaaatagaaacttgcttttcagtgtatatgcatttgaatcattgaaacacagtctgtgcatgcattacatattcacattaaaaaactaagcatttttgaaatagcagaaaagtttaagcaattacaaaaatgtgaaaatttccaactttaatcctgttaatatttagcaatattaggcgagaacatctgtaactattgctgaattaatattacttttataatacaaaaatttaaaataaacgtttttccaggaattttatcatcaaaataaaccccagaaaataatttcaaagtggataatctatccttatatatgtattaatacaattatatattttacatttacaaatatataggtataaaaattaaaaatgaatgtacttccaaacaagattgcacataaaaattacttcagaaaattgttaagatacacagaaaaaattgaagcatcataaaaaggaaattataatagtttacatatctagaaatagagtgcaaagttctaccaagaataagaataaattaatattaagcaatggtttgtgattttataatacacttacagaaattttattccactttatttacaactcagatatctaaaaaatagattgcttttgaaatacaaatgcaagaaacaattggagaaatctaaaatcataattagaagagagtagtgttttctttatcagccatctgatataatgttacacatcagtgggtgtagtaacggcttaggactctgagcgccgctgttgatcaactctaagcgaaaatcaggactccatccggatttccagttctgcggctacacaaaacccggcagataccacaaacctgctcccaggctgcagcaaaactcagcctctttcttctaaggaaaagatcaccatactttgcagggtggaagaaagaacctgatgaagcagcgcgcacagagatccttttgagaaaattccaaagcgaggcagcaatggcagctccaaccaaatgccagctccgcggaagattagtcctgctatgctcgctcctggggatgctatgggaggccagggccagtcagattcgctactcagtgcctgaagagacagaaaagggctatattgtgggcaacatctccaaggacctggctctggagccccgggagctggcggagcgccgagtccgcatcgtctctagaggtaggacgcagcttttctctctgaacccgcgcagcggcaccttggtcaccgcgggtaggatagaccgggaggagctctgtgctcagagcccgcggtgtctggtgaactttaaagtcctggttgaagacagagtgaaactgtacggaatagaaatagaagtaactgatattaacgacagcgccccaaagttccaggccgaaagtctggaagtaaaaattaacgaaatcgcggttcctggagcacgttatccacttccagaagctattgatccggatgttggcgtgaactccctccagagctaccagctcagccccaatcaccacttctccctgaacgtgcagactggagacaatggagccataaacccagagctggtgctggagcgcgccctggacagggaggaggcaactgcccaccacctggtcctcacggcctcggatggcggcgagccgcgtcgctccagcacagtgcgcatccatgtgacagtgttggatacaaatgataatgccccggtttttgctcaacggatttaccgagttaaagtccttgagaacgtgcccccaggcacctggctgcttactgcaacagccagcgacctggatgagggaatcaacggaaaagtggcatacaaattctggaaaattaatgaaaaacaatctctgctattccagcttaatgaaaatactggggaaatatcaacagcaaaaagtctagattatgaagaatgttcattttatgaaatggaaatacaagctgaagatggtgggggattgaaagggtggacaaaagtgctcatttcggtggaagatgtaaatgacaatagacctgaagtgaccattacatctctgtttagcccagtgagagaagacgcacctcagggaacagtaattcttcttttcaatgctcatgaccgagactccgggaagaatggtcaagttgtctgttctatccaggagaatctatcttttacattagaaaattcagaagaagattattacagattgttgacggcccaaattcttgaccgagaaaaagcctcagaatataatatcacggtgactgcaacagacagaggaactccgcccctgtccacagaaattcacatcaccctgcaagtgactgacatcaatgataatccacctgctttctctcaagcctcctactcagtctacctcccggaaaacaacgccagaggtacttccatcttctccgtgattgcctatgaccctgatagcaatgagaattctagagttatttactccttggcagaggataccatccaagggtctcctctctccacctatgtctctattaactcagacactggtgtgctgtatgctctgtgctcctttgactatgagcagtttagagatttgcaaatgcaggtgacggcaagtgacagtggaagcccaccacttagcagcaatgtgtcattgagactgtttgttttggaccagaatgacaatgccccagaaatcctgtaccctgccctccccactgatggttctactggtgtggagctggcaccccgctctgcagagcctggctacctggtgaccaaggtggtggcagtggacagagactcaggccagaatgcttggctctcctaccgcctattcaaggccagtgagccagggctcttctcggtggggctgcacacaggtgaagtgcgcacagctcgggccctgctagatagagatgcgctcaaacagagccttgtggtggctgtacaggaccatggccagccccctctctcggccactgtcacgctcacagtagccatagctgacagcatcccagacatcctggctgacctgggcagtcttcagatccctgcagacctggaggcctcagaccttaccctctacctcgttgtggctgtggcagtcgtctcctgtgtcttcctcaccttcgttatcacgctgctggccctcaggctgaggcactggcactcctcgcatctgctgcgggctaccagtgatgggttggctggtgtgcccacctcacactttgtgggtgtagatggggttcgagctttcctacagacctattctcaggagttctccctcaccgctgactcaaggaagagtcacctgatcttcccccagcccaactatgcagacacactcatcagccagcagagctgtgagaaaaatgagcctttgtgcgtctctgttgattccaagtttcctatagaagacacccctttggttccggtgagttcattttttttctttctttcttttctttttttgttttttgttttgttttgtttttgagacagagtcttactctgttacccaggctggaatgcagtggtgtgatctcggctcattgcaacctccgcctcccaaattcaagcgattctcctgcctcagcctcccaagtagagtagctgggactagagtagagtagctgggactacaggcctcccaagtagaataactgggactacaggcacgtgccaccacgcccggctaattttttgtgtgtttttagtagagacggggtgtcaccatgttggccaggctggtcttgaattcctaacctcaagtgatccacccacctcagcctcccaaagcactgggattacaggcgtgagccactgcgcctggcccttaactttctattatagttagctttctctttaactgtctgtacttaaggtagtataagttgatatcagtgtgtttctcatcacttttcactgggcctaattgttgctccaacactgaaaggaggcatttattagttatatttgctgatataactttcatgttctcataataattaacctgctgtcaacgtaaaccatacttcatggggtagctctcagcctgcattgatgtgggctttttgggtagggttgcttcattggttgcagtggactcatatcataaaattcttactcctttttttttttttttaagagatgggggtgtcattctgttgtccagggtggaatgcagtggtgtgggtaaagcttactgcagtctcaatctcctgggcttatgcaatcctcccacctcagccttcacagtagctaggactgaggtgggagggctagcaagctatgttgcccagactggtctcaaacgatcttcctgcttcagtttcccaaagcactgggtgaggtgtgaaccacctcacccagcaaattcttactcctacgatcatttattcaggtcatactatgtttgtaagggtaaactgataaaaaggtaaatgtattcttcttagagaaacagctgaaagcccagatttattgcttctattcttccatttctatgacaggaaaacacctctttgaggttatatttttcagatcacaagtgtgtaaagtctgtttgtgtttacagatattttctgacgaagattcaaacttcagttatccacttccaaaccctagtaaaccaattttttccctttaatggtgaaagttgtcacatcttttattctcatatcttcaaaggtcttaatttcctaatgctttaatgttaaattatggagaatagtaggacattcttcttttctatagtatatgcttgctcaagagaagtttctaagactggacactgtgaaatgacaaaacaaggaattaaaaatatttctctcacttatatattatttctggctcaattctccaacttttgagtctagaaatgaacttgcatatcagatataatttaagaaaatattctcaggaactgctgggaagattctaaaactattttactgtttttagctataaggaagagaataatgtattatttaatgttattttaaacatagtgttgtttcaaatagtaaataacatttcacaagacatttgaaaataagctttgaagttgactcaaaattctatgctaaacatgtgatccatagatacactgatgactgctggcatttctgtggaaatgaagaattgttttatttgtttgtaattatttgggtttcagttgctttatttttaagaaaaaaaagctgaagtgtctgggaatcctttatgacatacagacattttaattatttcaaacacgttttcccccttaagtgggtagcaaaaaaaataaagcatacttcaggctcatatttttaaccatgcaacaagaaaattgttacaatttctgttctgaggagtagccttcatacttagtatttataaatattgaaatgtatgttaatttggggaaaacataacagatatccatgaaggcttgtatgtcatggtaggtagttactattcgataccacaaaaatgtctcttgcccttaaaaccagaacacgaggctcaccagacagatgactgaatggagtatggaaaatctttatttctgtttttcttaggctatgtaggacttaacttattgtgcattggtaacagattgtagaacataagctgaaagataaaattcttgaccttaatgtctcatcttaaaaagaagcattggttgacattctatatctcgtattacttaaaaataatgggggagcgcagtatatattaaacaaagattggctttgtggtgatcattgttgaaggtggggtgatggctatgtgaaggttcactatatatactccctactgttgtataagtttgaaattgtgcataatagatttatttaaaacacaaagcatagaaatatctactataatattatggtgagagcaaaatttgagggggatgtacacctgcattttcgaagaatatatacatttcggagaccgaattcaaaatgaaaaaccgggctgctgtcccgcacggagcctctgggcgccgctgtcggccagtgcagagcaagcgctgacgccggggatccgtcagcctctggcctgggattccctgcgcagccaacaacagaaagaagaaaaccagctcccacacagagcctcccggctgcgcagacctttcccagcacagcggattgccagctccgagacccgggactcctcctgtcctgggccgaatgctcttttagcgcggtagagtgcactttctccaactggaaaagcggggacccagcgagaacccgagcgaacgatgggagggagctgcgcgcagaggcgccgggccggcccgcggcaggtgctatttcctttgctgctgcctttgttctaccccaccctgagtgagccgatccgctactcgattccggaggagctggccaagggctcggtggtggggaacctcgctaaggatctagggctcagtgtcctggatgtgtcggctcgcaagctgcgagtgagcgcggagaagctgcacttcagcgtagacgcggagagcggggacttacttgtgaagaaccgaatagaccgtgagcaaatatgcaaagagagaagaagatgtgagttgcaattggaagctgtggtggaaaatcctttaaatatttttcatgtcattgtggtgattgaggatgttaatgaccacgcccctcaatttgataaaaaggaaatacatttagaaattttcgaatctgcatccgctggtacacgactatcgcttgaccctgccacggatcctgatataaacataaactcaattaaagattataagataaactctaatccttatttttcattaatggttagagttaattccgatggtggcaaatacccagagttatctctggagaaactcctagaccgggaagaacagagatctcatagcttgatattgactgccttggacggaggggacccaccaagaagtgccaccgctcacatagaaatttctgtcaaggataccaatgataaccccccggttttcagcagagacgaatatagaattagtcttagtgaaaatctgccccctgggtcccctgtgttgcaagtgacagccactgaccaggatgagggggtcaatgctgagataaactactacttccgaagcactgcccagagcacaaaacatatgttctcattggatgagaaaacaggtatgattaagaataaccagtcatttgattttgaagatgtagaaaggtacaccatggaagtggaagcgaaggacggaggtggtctctctacccagtgtaaagtaatcatagaaatccttgatgaaaacgacaacagcccagaaataatcatcacttctctctctgatcagattttggagaattcacctccaggaatggttgttgccctcttcaaaacacgggatctggatttcggaggaaatggagaagtcaggtgtaatatagaaacagacattccattcaagatttattcttcttccaataactactacaaactggtgacagatggagccctggaccgagagcagacaccagaatacaatgtcaccatcgtagccactgacaggggcaagccgcctctttcttccagtagaagcatcaccttgtatgtcgctgacatcaacgacaacgccccagttttcgaccagacgtcctacgtggtccacgtggccgagaacaacccgccaggagcctccattgcgcaagtgagcgcctctgacccggatttggggctcaatggccacatctcctactctatagtggcgagtgacctagagcccctggcggtgtcgtcatacgtgtcagtgagcgcgcagagcggggtggtgttcgcgcagcgcgcctttgatcacgagcagctgcgcgccttcgcgctcacgctgcaggcccgcgaccacggctcgcccacgctcagcgccaacgtgagcctgcgcgtgttggtgggagaccgcaatgacaacgcaccgcgggtgctgtacccagctctgggtcctgacggctccgcgttcttcgatatggtacctcgctctgcagagcccggctacctagtgactaaggtggtagcggtggacgccgactcgggacacaacgcctggctgtcctaccacgtgctgcaggccagtgagcccggactcttcagcctggggctgcgcactggggaggtgcgcacggctcgagccttaggcgacagggacgcagcccgccagcgcctgctggtcgctgtgcgtgacggtggacagccgccactctctgccaccgccacgcttcatctggtcttcgcagacaacttgcaagagatactgccagacctcagcgaccgccctgtactctctgacccccaggctgaactgcagttttacctggtggtggccttggccttaatctcagtgctcttcctcctcgccgtgattctggccattgccttgcgcctgcgacgctctctcagccctgctacttgggactgcttccatcctggtctctgtgtcaagtctggacctgtagttccccccaactacagtgaggggactttgccttattcttataatctgtgcattgcacatacgggtacaaaagagtttaatttcctaaaatgcagtgtgcccctacattccaatgaagacatggtttgcagtgtttctcctggagccttaattccacctcatggtggggaggatttgacttcacatcctgagactctgacttcggtgagtttctcttttttgtgtgtgatttatctaatagtctactagtttctcatattttaggcatactactttattttcatatctagaatcatatgtttaaaatccatagctttttacaatattttctcaatgttttttcaattatagttttcactatgtatttggttcataagttgctctatctttttgtaaaataatgtcaccagactgaagatattttgtctttgtcttttttttttttttttttttttgagatggagtctcgcactgttgcctaggctggagtgcagtggcgtgatctctgctcactgcaacctccgccttctgggttcaagcgattctcctgcctcagcctcccaagtagctgggattactggtgcccctcaccacagctaaattttttgtatttttagtagacatggggtttcactatgtcgaccaggctgttcagaaactcctgtcctcgtgatcctcccaccttggcctctcaaagtgctgggattacaggcgtgagccacaatattttgtcaagttctgactatcgaacagaagcagtggtcttggcatctaagaaaacaaacaagtaacctatctattcaaatttgcgaagacttagtgaatttacgatatcttatttatatatttttaaagcctaaaaatattcagaagacaggcccagtggctcacacctataatcacagcactttgataggctgaatcggaaagtatcacttgagcccaagaattgagaccagcctgggcaatatagggagaccccccatctctactaaaacaacaacaacaaaaaaaaacattagcagagtgtggtagcattcccctgtggtcccagctacttgggaggctgagctgggtggattgcttggtcctgggaggtcaaggttgcagtgagccctgatcttgccactgcactccagcctgggcgacagagtgcgaccctgtctctaaaataaataaataaatatgcaggcagggccaagtgtgctgtaatcccagcactttgggaggtggaggtggagaatctcttgagcgcaggaatttgagaccagcctgggcaacacagggagactccatcgctacagaacatttaaaaattagcagggtgtggtggcacatgcctgtggtctcagctactctggtggctgtggtgggagaatcgcttgagcccaggaagtctaggctgcagtgagctgtctaggtgacagagtgagaccctgtctcaaaaaaaaaagacatttctaagaaataaatgaaatactattgcctttgcactcagtctctgtctctgattctctgatagaagatttttgaagaaaaaagataaaatctttgaagagttctatacttggaaggcatagtgacataaacacttctgaacatcctgttctctgtgtgaaagaagtgaacttctataccctttgcatttgagggaacaattgctactgggttgatgggcacacacagttgaagatatgtgaaccactggactttggcctctgatacaaactgcctaagagaagagattatttatactggtattaatgctctgatgaaaacaggtcatttgacataaacacttacttgttaaaaacctatatcactacatctaactttgttttctaaaacttttagtacttcaaattctacgtatttcttttctcattacaatgcaaacagtttaatttgcaactgtaatatatgttcattttagtttgtgattacctgcttaatcatttaaataggtccatttaacttgtatccctgtaagataaagtatgttttacacaaaaaggttaattaaggctcagtaaaactattctagaagagtactttaaaaacctcttacacaatcctaagctaaataagtttaatgaattaagtagttacaattataaagcttcagagtgaattatctcatgagtttatttaatataatctttgtatgaatgtatactaaataaaattggcctattcaaatcacaattttaaattataagacttttctgaatttacctagacactaatatgacctaaaataagtattatttaccttttattaaagtgtgtacatttctgttgggaaaacgtgttgcaaatatatatttaaccaaacattatcttgaaatatttacaatattttcactccactttatcacacctcccctaagaaacctacatatagtaaattatttaaagataggagtggagaaaccaaagaatctatgtaaaatataataatccaacagaatagtttactttccattgcatgtatcacttgggtgcagtaacttcttaggactctgagcgccgctgttcacctactaggagagaaaacgcagccagagctcaatccggattctcagggcttcaactacacaagccccacaaaccggctgctgggctgcagggaagctcactccagaatttaaagtgcccaggctacagagacaccctgaagccacagaaagacaaaggaaccggttgaaacacacaacgtgtccagtgaggactttgcagaattctgtaaccagactacaatggccgctcaaaggaatcgctcaaaggaatcaaaggattgcagcgggctggtcctgctctgccttttcttcgggattccatgggaggctggagcccggcagatctcctactcaattcctgaggaattagagaaaggctctttcgtgggcaacatctccaaggacttgggtctggcgccccgggagctggcggagcgcggagtccgcatagtctccagaggtaggacgcagcttttctctctgaacccgcgcagcggcagcttgatcaccgcgggcaggatagaccgggaggagctctgcgctcagagcgcgcggtgcgtggtgagttttaatatccttgtggaagacagggtgaaactttttgggatagaaatagaagtaactgatatcaatgacaatgctccaaaattccaagcagaaaatctagacgtaaaaattaatgaaaatgtcgctgcgggaatgcgttttcctctcccggaagctattgatccggatgtgggcgtgaactccctgcagagctatcagctcagccccaataagcacttctccctaagagttcagagccgtgccaatggcgtcaagtacccggagctggtactggagcactccctagatcgcgaggaagaggccattcaccacctggtcctcaccgcctccgacgggggtgaccctctccgatctggcactgtccttgtcagtgtgactgtcttcgatgcaaatgacaacgcgccggtcttcaccttgccagaataccgagtgagtgttcctgagaatttgcctgtgggcactcagctgctgacagtcacagccaccgacagggacgaaggtgccaatggagaagtgacatattcattccgaaaattacctgacacgcaattgttgaagttccaactaaacaaatatactggagaaataaaaatatcagaaaatctagattatgaagaaaccggtttctatgaaatagaaatacaagcagaagatggaggagcatatcttgcaactgcaaaagtgttgattacagtagaagatgtaaatgacaacagtccagagctgaccatcacgtctctatttagtccagtgactgaagattcacctctgggaacagtcgtagcccttttaaatgtgcatgatttagactctgagcagaatggacaggtaacctgttccattttggcgtatctaccatttaaattagaaaagtccattgacagttattacagattggtgatacacagagcccttgacagggaacaggtatcctcttacaatatcacagtgacagccacagatgggggaagtcctcctctatcaacggaagctcactttatgctacaagtggcagatatcaatgacaacccacctaccttctctcaagtctcctactttacctatatcccagagaacaacgccaggggtgcctccatcttctcagtgacagcgctggacccggacagcaaagagaatgcccagattatttactccctggctgaagacaccatccagggggtacctctgtcctcatacatatccatcaactcagacactggcgtcctgtatgcactcagatccttcgactatgagcagtttcatgagctacagatgcaggtgacagccagcgacagcggggatcctccactcagcagcaacgtgtcgttgagcctgtttgtgctggaccagaacgacaatgcgcccgagatcctgtaccccgccctccccacagacggttccacaggcgtggagctggcgccccgctccgcagagcccggctacctggtgaccaaggtggtggcggtggacagagactccggccagaacgcctggctgtcctaccgtctgctcaaggccagcgagccgggactcttcgcggtgggggagcacacgggcgaggtgcgcacggcgcgagccctgctggacagagacgcgctcaagcaaagcctcgtagtggccgtccaggaccacggccagccccctctctccgccactgtcacgctcaccgtggccgtggccgacagcatcccccaagtcctggcggacctcggcagcttcgagtctccagctaactctgaaacctcagacctcactctgtacctggtggtagcggtggccgcggtctcctgcgtcttcctggccttcgtcatcgtgctgctggcgcacaggctgcggcgctggcacaagtcacgcctgctgcaggcttcaggaggcggcttgacaggtgtgtccggctcgcactttgtgggcgtggacggggttcgggctttcctgcagacctattcccacgaggtctctctcaccgcggactcgcgaaagagtcacctgatcttcccccagcccaattatgcggacacgctcatcagccaggagagctgtgagaaaaacgatcctttgtctttgttagatgattcgaagtttcctatagaggataccccattggttccagtgagttttattttcatttttacttttgttaaaaaaaaaaagattggtttttactttgaagtttgcggcatgatggtggaaagtgtaaatgctaaaacactgatgagtagaatttgatgtttattaaggttttttttttttttttttttttttttttttttactttctggtaaaattcacctagtctcaatcaaggcctatatatcataaggctttgttatgattagctttgcagaaccttgtagtttatagtgttgttgagtacaatattgacaattcctaagacagacttccatacagaagtgcctgtcaatttatatttcctcctgggtggtcacatattgaaactccagccccttaagcaaccctcttgttctgaaggcaggtctggtaagaataggtaagtatcagaaagaaatcacctctggaaacacaacccaaatccaagaatactcaatgcagttcttcccaaggagaagggcaataggcctttttcaaactacattttatatatttttcaatctatactttgtggtgatagttgcagttgaatatactaagtttttcattaatattgaattaacaatttatttataacaatgtatgcttagatttttccagccctatttataactgataacactgcagtatcctttttgcatacaattctctaatttcacactgctatgtggaagatatagcattttaatttaactttcattgctcaatagggatcctgaggaggctatagagggtgaaattaagaatatttgggattctgcttttgtcttttttgttaaattttctagtgactaaggctgaaagtaaatatgggttgggaagacagataaatttgtacatgttcccgagaacaggagcaagagatatatgacaaagctatttcagtggctctttaatgtataaggaggcaaacacctgaaactctgaaaactctgaaattgagaggcaaaataaacttagagtcaagaaagaaatgccatttctgcagatcagaatataaacaccaaccacagctgtaaaaaagaaaagaatatatgcaacgaagggaaattatataaacaaaggatcattggaggtactgatgagttcatttagttcaatgaaaatagtgacgtattaggtagatctcttaattttattactagtattctactaaatgtggtagtataaagtcaaaaagcattccgaagtttctcaagacccttataattccatgatttttttcaggtcagtcaacatttgttgaatgataggtctgtggaaggaaagcacactctttagggtcatagttattaactattaaaccattgaaactattattttatatttgtgttaatgagagtcaaaattattgtgcattcatctcaaataattctattattttgaaaaatacaggttttttttttaaaaaaaactgctcttgacattgtagctattgtgagaaaatattttgattataattatttaaaagcaatacaggacaccctggatgatggtaatgactagggcaatggttgcattccagtacttaagtatgaaataaggaattattactttctgggtgaatataggctagaattgaagacaaaaaaatttgttgcttatcttcagtacttccagcttcatagataattactcttaaaaggaacaagaatgactgcctctggatggaggaattggatagcaatgggccgtgggataggagacctataaaccttcatgctatattattttgtgcctttttaaattttgaagaaaaaatattcatttattcaagatatatgtaaattcagtaaataaaaagatatgatagttatgaccaagtggaaatatatttcctgatgtaaaaggaatcactgaggaaaaagattaaaatattttggctgtcaactcgtagtttaaaaaaaattccttgaaagaggtagagaaaagtcaagttgcagtcccacacagagcctctgggcgccgccgtcggccagtgcagagcaagcgctgacgccggggatccctcagcctctagcctgggattccctgcgcagccaacaacagaaaagaaaaccagctcccacacagaggctcccggctgcgcagaccttgcccagcacaccagattgccagctccgagacccgggactcctcctgtcctgggccgaatgctcttttagcgcggtagagtgcactttctccaactggaaaagcggggacccagcgagaacccgagcgaacgatgggagggagctgcgcgcagaggcgccgggccggcccgcggcaggtactatttcctttgctgctgcctttgttctaccccacgctgtgtgagccgatccgctactcgattccggaggagctggccaagggctcggtggtggggaacctcgctaaggatctagggcttagtgtcctggatgtgtcggctcgcgagctgcgagtgagcgcggagaagctgcacttcagcgtagacgcgcagagcggggacttacttgtgaaggaccgaatagaccgtgagcaaatatgcaaagagagaagaagatgtgagttgcaattggaagctgtggtggaaaatcctttaaatatttttcatgtcattgtggtgattgaggatgttaatgaccacgcccctcaattccggaaagatgaaataaacttagaaatcagtgaatccgtcagcctggggatgggaacaattcttgagtctgcagaagatcctgatattagtatgaattcgctgagcaaataccaactaagtcctaacgagtatttctcattggtggagaaagacaatcctgatggtggcaaatatccagaattagtattgcagaagactctggaccgagaaacgcagagcgctcaccacttggtactgaccgccttagatggtggggaccctccccgaagcggtactgctcagataagaatcctggtaatagatgccaatgacaaccccccagtgttcagccaggacgtgtacagggttagccttcgggaagacgtgcctccaggcacctccatcctgagagtgaaggccactgaccaggacgagggcatcaactcagagatcacttattccttctttggtgtggctgacaaagctcagcacgtgttctctctggattacactacaggaaacattctaactcagcagcctttggattttgaagaagtagaaagatatacgataaacatagaagcaaaagaccgaggatctctctcaacacggtgtaaagtaattgtagaagttgtagacgaaaacgacaacagcccagaaataatcatcacgtcactctctgatcagattatggaggattcccctccaggagtggttgttgccctcttcaaaacacgggaccaagactcaggggaaaatggggaagtcaggtgtagcttaagtagaggtgttccatttaagattcattcttcttctaataattactacaagctagtaacagatgaggccctggatcgggagcagaccccagagtacaacgtcaccatcgcagccacagacaggggcaagcctccgttatcctccagcaaaaccataaccctgcacattactgacgtcaatgacaacgcgccggttttcggacagtcagcctacctggtccacgtgccagaaaacaaccagccgggtgcctccatagcgcaagtcagtgcctctgacccagacttcgggctcaacggccgtgtctcctactctctcattgccagcgacctggagtcacgaacgctgtcgtcctacgtgtccgtgagcgcgcagagcggggtggtgttcgcgcagcgcgccttcgaccacgagcagctgcgcaccttcgagctcacgctgcaggcccgcgaccagggctcgcccgcgctcagcgccaatgtgagcctgcgcgtgttggtgggcgaccgtaacgacaacgcaccgcgggtgctgtaccctgcgctgggtcccgacggctccgcgctcttcgacacagtgccgcgggccgcgcagccaggctacctggtgaccaaggtggtggccgtggacgcggactcggggcacaatgcctggctgtcctaccacgtggtgcaggccagtgagcccgggctcttcagcctggggctgcgaacaggcgaggtgcgcatggtgcgtgctttgggtgacaaggactcggtccgccagcgcctgctagtcgctgtaagagatggaggacagccacccctttcagccactgccacgctgcacctggtgttcgcagatagcttgcaagaggtactgccggatttcagcgaccatcccacaccctctgactcccaggctgagatgcagttttacctggtggtggccttggccttgatttctgtgctctttctcctcgcggtgattctagctattgctctacgcctgcgacagtctttcagccctactgcaggagactgctttgagtcagttctctgctccaagtccggacctgtgggtccccccaactacagtgagggaacgttgccctatgcctataatttttgtgtgcctggggatcaaatgaatccagaatttaattttttcacatctgttgatcattgtccagccacacaagataacctcaacaaagatagcatgctactggctagcattttaactcccagcgttgaagcagataagaagattcttaaacaggtaagtatttaaaaatgtatttaatcctttttatattacaatatgccaatatattccaatatagtggtattattttaagattctagataacttcttcatagagttcgcaaaatataggtcaaatttatggttatcattattaaaacaaaagtttaaattaaatgcctcagtcttcctactattcaaagacattttaaagcaaactacatgggtaatctccggtgacatttttatgaagtaaaatacctttcggttaaaaatataaaatacaggtatatttttacggcatggtattttaattgaaaccctgatgctactcaatttttctcaagtatttcatcttcatttactcaataaaggaaccttgtaagaattatagttaggcatcctacctgatgattttatcgggaccgtattatttccacttccagaaatgtcgttcctttcagtcggttaaaatcaattggaaccaactacaacctacaagttttcagctccagtaatattttgaaaactttttaaaaattaagcaagcccttttaataattactcctttcgcaggtgttcttggtaaagttttaacgtcacataatgtaagtattgtgtatcatcgtttttaagctctacaaatacgtgtgattcacaaaggtgagcgtaatcatttcttctggaatttcttagtcgttgcaataataagaatgggctctaggcgccgctgctcaccaatcagggaatgggaagctgcgcgccattgagtccctccctcccccgcctctaccacacaaagcggaatgagatggatactcacagatcctgacactggagacttagaagtattttccttcgctttctgatatattttggatgtagtcggcctaggacttcatagatacataagccgattcacaaccaaccagctcgagaaaccgcggaatatcggcttagagcctgccatggcgaatcggctacagcgcggggaccgcagtcggctgctgctgctgctgtgcattttcctggggacgctgcgggggttccgggccaggcagatccgatattcggtgccagaagagaccgaaaagggctccttcgtgggcaatatctccaaggacctggggctggagccccgggagctggcgaagcgcggagtccgcatcgtctccagagggaagacacagcttttcgctgtgaatccgcgaagcggcagcttgatcacggcaggcaggatagaccgggaggagctctgtgagacggtgtcctcctgttttttaaatatggaacttctcgtggaagacaccttgaagatttacggagtggaggtggaaataatagatattaatgataacgcccccagcttccaggaggacgaagtggagataaaagtcagtgagcacgcaattcctggggcgcgatttgctcttcctaatgctagggatccagatgtgggcgtgaactccctccagagctaccagctcagccctaataattacttttccttgcaactgcggggcagaacggatggggccaagaatccagagctagtactggagggaagcctggaccgagagaaagaggctgctcacctgctcctcctcacagctttagatggaggcgatcccatccgaaagggcgcagttcccattcgtgtggtggtcctcgatgtaaatgatcacatcccaatgtttacacagtccgtatatcgcgtgagtgttccagaaaacatcagctccggaactcgggtgctgatggttaatgcaacggatccagacgagggaatcaacggggaagtaatgtattcatttcggaacatggaaagcaaggcttctgaaatattccaattggattcacaaactggagaagttcaagtacgggggtctctggattttgaaaaatatagattctatgagatggaaattcaaggccaagatggtggaggtctctttaccaccacgacgatgttgatcactgttgtggatgtgaatgataacgctccagaaataactatcacctcttctattaattcaattctggaaaactctcctccaggtacagtgattgctcttctaaatgtgcaagatcaagattctggagaaaatggtcaagtctcctgttttattcctaaccacctgccttttaaattagaaaagacttatggaaattattacaaattgataacaagcagagtgctggacagggagttggtccagagctacaatataacgttgacagccacagaccagggaagcccgcctttgtctgcagaaactcatgtctggctgaatgtggcagatgacaacgataaccctcccgtttttcctcactcctcttactctgcctacattcccgaaaacaaccccaggggtgcctccatcttctcagtgaccgccctcgacccggacagcaaacagaatgccctggtcacttactctctgacggatgacactgtccagggggtgcctctgtcctcctatgtctctattaactccaacactggtgttctctatgccctacaatccttcgactatgagcagtttcgagacttagaactgagagtgatagcacgtgacagcggggacccgcccctcagcagcaacgtgtcgctgagcctgttcgtgctggaccagaacgacaatgcgcccgagatcctgtaccctgccctccccacagacggctccactggcgtggagctggcgccccgctctgcggaacctggctacctggtgaccaaggtggttgcggtggacaaagattcaggccagaacgcctggctgtcctatcgcctgcttaaggccagcgagccgggactcttcgcggtgggggagcacacgggcgaggtgcgtacagcgcgggcactgctggacagagacgcgctcaagcagagcctcgtggtggccgtccaggaccacggccagccccctctctcggccaccgtcacgctcaccgtggctgtggccgacagcatccccgaagtcctggcggacctcggcagcctcgagtctctggctaactctgaaacctcagacctctcgctgtacttggtggtggcggtggccgcagtctcctgcatcttcctggtctttgtcatcgtgctgctggcactcaggctgtggcgctggcataagtcacgcctgctgcaggcttctgaaggcgggttggcaggtatgcccacgtcacattttgtaggcgtggacggggtacaggctttcctgcaaacctattcccacgaggtctctctcattgcggactcgcagaagagtcacctgattttcccccagcccaactatggggacacgctcatcagccaggagagctgtgagaaaagcgagccactcttgatagctgaagactcagctatcattttaggcaaatgtgacccgacaagtaatcaggtgagatttatttctctgcctcctaattgttggtgtcttggcacaagtcttttaaggagatgttttttgagcctgttatgaaaactgtttggggggggggtggggcggcatatatttagttcatatatatttagagcaatacatgtgagttttactttgcctttcatgagattacgataatctttcagaacgtttttgtgaaagtcatttttcaatcttggcatattttcttttgatttcaaaggggccattcaactatgctggtttggtttgaagtaagttgaattttagtattatttttctattatcagtgtatgaggctctcaatttattatatatagatacaaattaatgattcacaaacactttttatttccatttcaattttgctgtgccttcactgatttgtagttatattccaccattatttgctattactgctaatgttcaaattttgatcctgttgatttaatagcatgctccctctagctctccttctcatctatctatctatacacatgcacacacacttatacacgtaagcttttctctgagcaattttattttgattcttggtggctggtaatatgcttagatcctgttgactatttcaactttgtctcatttcttcatcctatcaacacagacatattgactggcttttaactactggatttccttgggagataaaatttagatcacattttttcttaagctctagatgtcttttccattactatggtgaagttacattgactgttctgaggaaataattgaattattgaactggtattatttccttttattcttttactttggtgtctgtgtttgtatgtatggaaggttttttaatgtagtaaatccatatatagaaataacttgattttgattcagtgcttctcaaaaacctattttcaaatgtgctaaagatgtctacagatttattcaaatagagtagtttgtgaatatataaatagattgaaggtatttggactttaattaaactgatttagctagtatccttctggctatttttttgttcattttcagtgtagttgggagtcatagattccttctttctttctttataaggtcattcttatggcaaatagtacattcagttcttttattcagaccaacttgttattgaagcttgatagttgcctgacatacatgttatctgaagcaatgtctaggaaagccaaatgaggaaaggagacttatctagggtttttgatcacaggaatcatttccataatcaattcagtcaacactctcacatcacttctaggtatttgccccaaattacttggatatttatgttccctttcaagtttagttttctcatttaggaatttaccttatgtcattagttgtaaactgactatctagggctcggacaaaaataatttcaactgtaggaaaggcaagtcttccaacagatgcctacatttttcttgaagtcaagaaaaatgttcaggtattttgagcatctagggataggatttatacttgtggaattccaaactgagaaaaatgatgtaaggcattgtactttgactggaattagttaaataaaaaggatatgaggtatttggctgggaaaaggagattgttccatattataaaacctcatctaaactaacttcccaagatcgtggagaacaaaaaggaagggttggctttgaaatgtgatattaagagggttatgttgattcggaggtagtgataaagttctgttaaggtataacatatagtcccattaaatagaggataaaaataaaacaccatcacatttcatgttattaattcctatggcaacctactaggctatacctttatattctctttatgatgaaacatgaaacaataatccttttcagaaacctcttttataagtgataagaagggtttggctaactttattctgaatatgccctatatagctttcagtgctcctccagttttctctgataaaactaggaggaaaattatctgcacatcagattgaaaataatactgcatatcatttcatagtggtcaaaattttcccataccacttgatggggatgttttcccacaaggtttttgttctacaacaggagagaagactttgcctagttcttccaatatgtgcattgcttctgcttagaaaaaaacaaacttttaaattctctttgctgggttaatgactgttctatagattcccatctctaaggaatcttctttggtagtaaacactggaaaacagtcactacgaaaactcataaaatgtctagtttcctatacattagtccaacacatcagtctaattctgaatcccattgaattagcaaaggcttccggctgcagttttctaaatagactcagagccctgctgttggccaatgtgctgcaagaactggagcctgggatctaccaggacgatattctgttcagtcacagaagcaagtcggagagtggccaagacttgggctttctgctcctgcaaatctgattccatacggattggggtgccctcaaactgggagcattgagttttctatgtatggaagtaaatattttaaaagcactttgtgaaacattttctcttaacgtcggagactgcagcaacgcatgggaaggatgggaaacagggtgaagcagagaagcaggacccggcagtggcaagcactcttccctttcctgctgcctttgttctgcggggcaccctcggagcagatccgctactctattccagaagaaacggtccagggctccgtggtggggaaccttgcggaggacatgcggctgcatgttcaggatttattgacctgaaaccttagagttagtgcagagaaacaatactttaccgtgaacacggagaatgggaacatacttgtgagtgacagaatagatcgagagtcactgtcttcaaaatcctctgtgtcatacccttagagattgtagcagagaatcctctaaatgtttttcacataaatgtgatgatagaagatataaatgataacccacctcattttccccaaaatagcattgttttacaaatcaatgaactagcaattccaggcattcggtttggcctggaatctgctatagatgcagatgtagggcctcactctctccagagttaccagctcagttctaatgaacatttctctctgatgatggacaagactaaaggcaagaacgctccagaattagtgctggagaagcccctgggccaggagcaacagagctctcatctcctggtcctggaagcaatggacatgggtgacccagtcccaactggcactgctgcaattcaaattgaggtcactgatgccaacgataatgccccagtttttagccaggatgtatacaaagtcagccttagagagaatgtgcccccaggcacctctgtactaaaggtgacagccactgaccaggatgagggtgtcaatgcggagatcacctactctttcaaatccctacgagatgatattggaaatatgtttgtgctagaccatcaaaatggggaaattaaatccaaagacttaatagacttcgaatttcgtagcagttataccatgagagtagaagctaaggatggtggaggcatgaccagcgaatgtaaaattatactagaaatcctagatgagaatgacaatgccccagacgtggtttttacttcagtgtccagttctgtaactgaggacgcagaaccctggacggtgatcactctgttcaaaacacatgataaagattcgagagaaaatggggaggttacatgcctcataaacgaaagagttccttttagaatcgaatcttccgccaataatgactataagcttgtaacagatgggaccctggattgggagcggatcccggagtacaacgtcaccatcactgccactgacaagggcaagcctccgctctcatccagcacaagcctcaccctacgcattggtgaagtcaacgacaatgctccggttttccaccaagtctcctacgtggtccacgtggccgaaaacaaccttcccggagcctccatcccacaagtcagcgcctctgacctggacctagggctgaatggccaagtctcctactccatcgttaccactgacttggagctgcgggcactgtcgtcctacgtgtccgtgagcgcacagagcggggtggtggtcgcgcagcgtgccttcgaccacgagcagctgtgcgccttcgagctcacgatgcaggcccacgaccagggctcgcccgcgctcagcgccaacatgagccggcgcatgttggtgggcgacctcaatgacaatgtgccgcgggtgctgtaccccgcgctggggcccgatggctccgcactcttcgatatagtgccacgcgccgcagagtccggctacctggtgaccaaggtggtggcggtggacgcagattcgggacacaacgcttggctgtcctaccacgtgctgcaggccatcgagcccgggcttttcagcctggggctgcacacgggaacctgctggttgctgtgcgtgacggaggacagccgccgctctctgcgccgctacgcttcacctagtcttcgcagacagcctgcaggaggcactgccagacttcagtgacagtcctgtgccctctgattcccaagcaaagctgcagatttacctggtcgtggccttggccttgatttctatgctcttcttcctcgcagtgattttggcggtcgccttgcacctgcgatgctcttccagcccctctgcctggggttgctttcaccctggtctctgttctaagactagaccaggggtttttcccaactacaatgagggaactttgctttattcctgcaatctgtatgttccctcggattctagaaaaagaagatttaattttctcaccatgacaccagaaacagtccccccacaagatctttctaatgaagtttctctggtagcaagcttcactgaagagaataacaagataagctctaactctgttgctcctactcacgtgagttccaatgaatgtctttcatttacaaatggatgaggtttaattttcaaaccaatattttggcaagaaaatcttaaacatattatatctactattgcttcaggtttgtttgcccactcttaatatttcctgttcctttctgtgtgggccagtaacttcattattagctttcatgtatttttgaaacattttcaccatttttacgggagactttttttttttttggacggagtctcgctctgtggtccaggctggagtgcagtggcatgatctcggctcactgcaagctctgccttccgggttctggccattctcccgcctcagcctcccgggtagctgggactacaggcgcccgccaccacgcccggctaattttttgcatttttagtacagacggggtttcaccgtgttagccaggatggtctcgatttcctgacctcgtgatctgcccgcctcggcctcccaaagtgctgggattataggcgtgagccactgcacccggcccggagacattgtttatacacacacacacacacacacacacacacacacacacgtgtgaaaagtgggtattatgatactgctgtcattgagatattttaattgaggaataaatttttttcctgtgatgtttcttgggacatcaatatttgagtatataaggctttttctttaatccattaactataaattttgaagaaaatgcatgagaaaatggagaaaatgtgttttttttttaaaaaaaattgagattaaggtctcattatgttgcccaggctggactcaaactcttgggctacagtaatcctcccacctcaatctccagagtagctgagactacagttgcctgaaactgtgcctggcagagaaaaaagcttaaaaaaataagaacatggtaatgatttgataatattcagttacatttacttttgattcttgtaattcaagtaaactcaattttatgtctgatattttctcacagctacctatatatttcttcccaatttaaaatatattattttattttatgcctagcaaatatctttacagtataaatatttacgctcatgaaagtacgtagccagttatttcttagggagaattttttccctatattttgatgggcttccaaaagtattaccagtaattctcagtaattacaattaggtcagttacccaggaaaaggtaagtctgtaacattctttggactaccaattttcttttactaagtttcctgaacaataaatatttttgaaatataatgtattaatagaattctggagtacttccattatttccagtcaatgcaagttggaatgcttctactttatgctaaaaatattaatgtttctttttcacttgggttcttgttaagtgtgattctgataatgtatacaatcacatatcatttttaggtttccataatatcatgaaaatttgatttttaagcgttacatgtcaacaacctggtaaagtaatccttccattcaggatcattcaaggaatctatttaaaaatattttccccaaattatagctgaatcagaaagtttaaattattatattatatgatttgtcaaaaagagaaactcctagggagacatctccataataggtgtgttgggggaacagtaatctcaaagcagatgcactaacattataagattaaaatcattgtttatagaaacttccaattcatttaaaagctcattggggaaaaaaaagctcattgggaaaaaaaaaaaaagctcactaaagtttctattaaagcgaatacggtagatttccatccccttttgaagaacagtaggtggagctatttaagatataaaaacgaaatatcctttctgggagttcaagattgtgcagtaattggttaggactctgagcgccgctgttcaccaatcggggagagaaaagcggagatcctgctcgccttgcacgcgcctgaagcacaaagcagatagctaggaatgaaccatccctgggagtatgtggaaacaacggaggagctctgacttcccaactgtcccattctatgggcgaaggaactgctcctgacttcagtggttaagggcagaattgaaaataattctggaggaagataagaatgattcctgcgcgactgcaccgggactacaaagggcttgtcctgctgggaatcctcctggggactctgtgggagaccggatgcacccagatacgctattcagttccggaagagctggagaaaggctctagggtgggcgacatctccagggacctggggctggagccccgggagctcgcggagcgcggagtccgcatcatccccagaggtaggacgcagcttttcgccctgaatccgcgcagcggcagcttggtcacggcgggcaggatagaccgggaggagctctgtatgggggccatcaagtgtcaattaaatctagacattctgatggaggataaagtgaaaatatatggagtagaagtagaagtaagggacattaacgacaatgcgccttactttcgtgaaagtgaattagaaataaaaattagtgaaaatgcagccactgagatgcggttccctctaccccacgcctgggatccggatatcgggaagaactctctgcagagctacgagctcagcccgaacactcacttctccctcatcgtgcaaaatggagccgacggtagtaagtaccccgaattggtgctgaaacgcgccctggaccgcgaagaaaaggctgctcaccacctggtccttacggcctccgacgggggcgacccggtgcgcacaggcaccgcgcgcatccgcgtgatggttctggatgcgaacgacaacgcaccagcgtttgctcagcccgagtaccgcgcgagcgttccggagaatctggccttgggcacgcagctgcttgtagtcaacgctaccgaccctgacgaaggagtcaatgcggaagtgaggtattccttccggtatgtggacgacaaggcggcccaagttttcaaactagattgtaattcagggacaatatcaacaataggggagttggaccacgaggagtcaggattctaccagatggaagtgcaagcaatggataatgcaggatattctgcgcgagccaaagtcctgatcactgttctggacgtgaacgacaatgccccagaagtggtcctcacctctctcgccagctcggttcccgaaaactctcccagagggacattaattgcccttttaaatgtaaatgaccaagattctgaggaaaacggacaggtgatctgtttcatccaaggaaatctgccctttaaattagaaaaatcttacggaaattactatagtttagtcacagacatagtcttggatagggaacaggttcctagctacaacatcacagtgaccgccactgaccggggaaccccgcccctatccacggaaactcatatctcgctgaacgtggcagacaccaacgacaacccgccggtcttccctcaggcctcctattccgcttatatcccagagaacaatcccagaggagtttccctcgtctctgtgaccgcccacgaccccgactgtgaagagaacgcccagatcacttattccctggctgagaacaccatccaaggggcaagcctatcgtcctacgtgtccatcaactccgacactggggtactgtatgcgctgagctccttcgactacgagcagttccgagacttgcaagtgaaagtgatggcgcgggacaacgggcacccgcccctcagcagcaacgtgtcgttgagcctgttcgtgctggaccagaacgacaatgcgcccgagatcctgtaccccgccctccccacggacggttccactggcgtggagctggctccccgctccgcagagcccggctacctggtgaccaaggtggtggcggtggacagagactccggccagaacgcctggctgtcctaccgtctgctcaaggccagcgagccgggactcttctcggtgggtctgcacacgggcgaggtgcgcacggcgcgagccctgctggacagagacgcgctcaagcagagcctcgtagtggccgtccaggaccacggccagccccctctctccgccactgtcacgctcaccgtggccgtggccgacagcatcccccaagtcctggcggacctcggcagcctcgagtctccagctaactctgaaacctcagacctcactctgtacctggtggtagcggtggccgcggtctcctgcgtcttcctggccttcgtcatcttgctgctggcgctcaggctgcggcgctggcacaagtcacgcctgctgcaggcttcaggaggcggcttgacaggagcgccggcgtcgcactttgtgggcgtggacggggtgcaggctttcctgcagacctattcccacgaggtttccctcaccacggactcgcggaagagtcacctgatcttcccccagcccaactatgcagacatgctcgtcagccaggagagctttgaaaaaagcgagccccttttgctgtcaggtgattcggtattttctaaagacagtcatgggttaattgaggtgagtttatatcaaatcttctttcttttttttttttaattgctctgtctcccaagctggaatgcagcggtacgatcatagctcactgcagcctcaaactcctaggctcaagcaattatcccacctttgcctccggtgtaacagggactacaggtgcaagccacctactgtctgcctatctatctatctatctatctatctatctatctatctatctatctattactttcttgtacagacaggagtctcactatgttgagcaggctgatctgaaacttgggctcaggctagcctcctgcttctccctcccaaactgctgggattacaggcgtgaaccacagtgccccgcccttatcagatattcttttctggctgggcgcggtggctcacgcctgtaatcccagtactttgggaggccgaggcgggtggatcacctgaggttgggagtttgagaccagcctgaccaacatggagaaaccccgtctatactaaaaaaatacaaaattagccgggcgtggtggtgcatgtctgtaatcccagctacttgggaggctgagtcaggagaattgctttaacctgggaggtggaggttgcaatgagctgagattgtgccattgcactccagcctgggcaacaagagtgaaactctatctcaaaaaaaaaaaaaaaaaactttatcctctagtttcatccattgatgacacttgctttaatcacttattacaatcacctccaaatgaagattttataattccattgtttcttctacagttgttaattggctttctaccttgaagaagagttttatattctctatatatgtttgtttctatgattctggaagcatggttttctattttattcaatggcctgtaatctgttaatatcaattatttattttgatgctgaaattgtcccaggattggcctttgggactccctttaggctgatttctatgtcctttctgttacagcaagcttgggattatatccaagatttgtaattccaatgtacttacttctgtcagtgtaaacaaagtacgatttctggactagatgacttgggcattgtgggggaggtggaaattagaggtattctctgtttttcctgtaggatcttgcatttcttcctcttgctgcttgtctctttgtgtcgggaacaggccccccaaaatctggccataaactggccccaaaactggccataaacaaaatctctgcagcactgtgacatgttcatgatggccgtaatgcccatgctggaaggtagtgggtttaccggaatgagggcaaggaacacctggcccgcccagggcagaaaactgcttaaaggtgttcttaaaccacaaacaatagcatgagtgatctgtgccttaaggacatgcccctgctgcagataactacctcaatccatccctttatttccgcccatctcttcgtttcccataagggatacttttagttaatctaatatctatagaaatgatgctaatgactggcttgctgttaataaatatgtgggtaaatctctgttcagggctctcagctctgaaggctatgagacccctgattccccacttcacacttctaaaaaaaaaaaaatttttttttctgagcttggagaaatatatcccttagtacacttggcatttataaagcagacatcaataaatttatatatatgtgacagataccaacaacaatccagtccccttccctcataccttatttatgtacatatattttatataatagatataatttattaacaatttataaaattactttgttaatactctatatcattttctagctgaatttatcaatgataatgctcttttcccacttttatttttttcccattgaccatgcagcagttttgtgtagaccgtctgataacaactgatctgtttatctaggggggagaaatctaattcaatggaaaatataaataaaattgtgataaacttttgtaaatagagtggcttttaactacacttgagatggctagcaaattcataaagtgaatttactttctttcaaagttcagtaattctttctggccattagggatatgtccatttatactttctcagtatcccaagtcatttcatggttttaaatcattcatgaacttccaaatatagtgaatttatttcttctgcatttaaaattttatcacttaaatatacaatataccgtattgccatgacgaaaaatggtaaagactatttttcacttctgttatgcatttcattaatacgatatctgtatgtgtttccaagttagacatttcttttgcccatttcctacactaatgatactaatgatgactttgtggaatattcagaattaacaaaatgtgttttgagtgctttttttagtactggggcaaatttgcagtaatatcgcctgctttttacattaaattccccataacttttacaactatgggaaaatttctgaaacgtgcacagattccaagtgttttctgagaactttatgcttattgtagagtggttacagacactgaatgctaaagtgtattactctttgaaaagcattgcttgatttcttttggtgaattctgtaaaggtgcagggaaacataacgtcccaattattttttctttcttctttgtttgctgcctatctactttgaaagatacaatagttaaaacccagaaaagagattggaaaccccttagagaatgaaagacatccaagggctctaaaatgcggcagttgctgcttctgagaccaaaaaagggggcaaaatatagagtgtgtggttctacttgtgtgattttttgaaagaaagtatttgaatttatctaaaaatactaaatttgtatttacattagttttcaaatagaatttaataagtacagtgttctataggtaatattgagagaaatagaggacaatgaaacctctctcctccatcatcttgtatgaactaccaaaatgtttatcatatggacagttctcatatatagtcaaatagaaagaaagacataataggaaaacaaatgacttgggaaactaagctaacatggtctaattattctgacctctgctcacctaacttgatttaggaacaaatcattgagagttagagcatgaatagtcaagactgttagaccatatctcaaatatcagtgacttcaatcaactatgtttccagtttaagctgaataggctttattaaatagttgttgaatgaatggataaacaaataatgtactctggggattacctgataccaggattctgaattttcagatgtatcatagaaggatagcagctttgcaattaggtaaattgttaactgtgtcacctttagcaagttatttaatctctttgagcttcagcaaagtaggaataatcatatctaatttgaaaggtcgtggtgatggctagggctaacaaaaatctgattcacaacatgcaattaattaacagtagccatttttagtggttgaccaaaaaaaggatttatattttcaatgccagcacactcgatgttctgttgggaaaaataataatgatttttgtgtgcttctccatatggtataatggaatgatttgtggatggaaataaaactgttctaaaatttttgtgacagctggtttaaaaatcttaagtgcctaggcacattcttgattgagaagccacagttttaggccataaaagatgggggaaagatttttatatgagacaattttgtgagtgttactttttctttgtctgaaccatagtgaaatctaaacaaggatcttgtgaaacttattttaaagaagcagtttacttcaatgggatcttagataatttcaccagaaaatggatcaccgaaaccagaaggctggtgatcattatttggtttgggccatataagaattgaaactaacggcttagctttaggatttttaggacacttgttgataatttaggattcataattaacatatgtgttgattgttttctgagactaactgggcaatgggtttggatgtgtttacatttattctgattccagtcataaaattatgtcaaggactttccttgtctttttatgtgtatgacagatgtgtatgtatccatttcatctaacaagttaaagcgttcagctataatttaaaatttgtagcttcactgttttatagtacctaaaattggaatgtaatcagtcagaagacattcatccactgctttcattccagaagtattatgctttttgaagcagcaatagcataggaatgttgaggagactatactatacttttatagcatatttaatctcgtagatcacttttcaatgaattataaggctgatgacaaatgagcaaattgtatcagttttctttatgacatgtaacagagtatagctgtgatcatgaattggatagttctggtgtaaaaatctgctttatccccatataagatgtcaggttcagaaaagcaaacacatagtttcgaagagatgttgatcaaactgatgaggctaaatctcaagaaagagacacagttaccctctaatgttacactttgagttcacctttttttttttttttgagacagagtctcaatctgtcgccaagctggagtgcagtggcactatcttggctcactgcaacctctgcctcctgggttcatgctattctcctgccttagcctcccgagtagctgggactacaggcacacgccaccacacccagctaatttttgtatttttagtagagatggggtttcaccatattggccagaatggtcttgatctcttgatcttgggatgcacccaccccacctcagcctcccaaatagctgagattacaggtgtgagccaccatgcccgaccactttgagttcacttttaagaaaccatacttaatggaaaattaccagtaacagggcatactgtttaggatgcattcctaaaatattaatggcaaaagatagccagcctatggcaaagctaattggaaaaaatattttataaaggatgagacttctggataccatatgggaagggctctggttcaggaaaatgtttttaaaaaactgtcattgaagagaccatagaatcaaacaaaataatttaatctgtatgtaaaagaagttggtaccaccataatttttcttatacatgtcatataaggatctactctgtgtattgtcattgagggcagatataatttcttagttcatcattaactctctgaagtatttcacacagtagtttgtacaccttctaagtactcaatacaatgcttgagttcaattattggaaagtggtctcttggagaaaaaagaatcatagtgcaaaaccaattattttacatggacttttcctctatatctaagccctaataagaggcagctgtctgatatacatacatacatacatacatatatatatatatatatatatatatatatatatatatatatatacacacacacacacacatatatgtatatatatatttggagtaggggatggagtcttgctctgtcacccaggctggagtgcaagtggtgtgatctcagctcactgcaacctctgcctcctgggttcaagcgattctcctgcctcagcctctccagtagctgggattacaggcgcctgtcaccatgcccagctaattttttaaaatatttttagtagagacagagtttcatcaagttggccaggctgctcttgaactcctgacctcaggtgatccacctgccttggcctcccaaagtgctgggattataggcatgagccaccgcaccctgccaactgtctgacttatcttaaaaggctaaggacctggtttgtttgtcaaattttgaaaatagatgcctcagttcataagatttccatattgtgtggcaggcgcctgtaatcccagctactcaggaggctgaggcaagagaatcacttgaacccgggagacagaggttgcagtgagctgagatcacgccactgcactccagcctgggcgacatagtgagactctgacaaaaaaaaaaaaaaatccatatgtgaaaattcttagaagcttcctatacaatttcagctgaagattcagccaacagttcattctgagactgtgttccatggaaaaagtaaagcccaggcatggaagtgggaatggaaagaaagattctaagcctacaaatactcaaacatcaagaagaaataaaaataagtcatcacttcgacttcatgtgctaacatcactgaggttataaattcccaggaatattttattgcgggagcaagactgcactgctgcctttcagcttgcaaattccagtgagaaacgtctttctctctgctctcaactaactctacagaacgctgtcctctcatttcttcaggctgcagttctagagtagggactcagagtgccactgttggccagtctggaaacagagataaatgagccaatccccagacattccggcttggtggcttttctaatttcatggaatgcaaatccaagagcagacccacaacattcctattatggctcctagttctacaaattataagcaggaacggaacggatttacaggcaatgagttcagctccttcttggctggagattctataatccaagaagagtttgaaaaggggcttatttgggctggagcagcagcaactctaactgtggaaaaggtggggaatggtgctggactgacagtctgggtagaaccaaggcgactactgcctcctttcctgctatttctatcctgctgggcattctctatgatgcagatccgttattcagtcctagaggagctggccaagagtttggtggtgggaaaccttgccaaggatctgggactcagtgtcgaggacatgcccacttgaaagcttcgggttaatgctgaggaataatacttcattctaagtggggaaagtggagacttacttgtgaatgactgaatggatcaggagcagatacgccccccaattatagcttgggccataacgctttgaaatagttgaaggccaggcatggtggctcacacctgtaatcccagcactttgggaggccgaggcgagcagattacgaggtcaggagttcgagaccagcctgaccaacatagtgaaaccctgtctctactaaaaatacaaaaattactgggcatggtggtgcaggcctataatcctagctactcggggggccgaggcaggagaatcgcttgaacccgagaggcaatcgcaccactgcactccagcctgggtgacagagcaaggcgccatctcaaaaaaaatgaacaaacggtagttgaaaattctttaaatgtttttcacattaatatggagattcaggatatgaagaatcatgcaccacggttcagcaggaatgttattaagttacgtatctctgagtttacccagctggaacaagatttgcaacagaacctgcagaagatcctgatgttgagagaaattccttacaaaattatcaccttagcagcaactctatatttctctttgaagtaaaagtgaccaacagtggaaagacatatgttgatcctgtgttagagaagctgcttgactaggaaaagcagagctcccatcccttagtgctagcagccttagacggccccccaacaaagcagcatcactcaactcctgatcctattggttgaagccaatgacaaccctgtgttcatctaggatgtgtacagcgtcggccttcaggaagatgtgcatccgggcactcctgtgctgagagtgagggccaccaaccaggactagagtgtcaaggcagagatcacatatggcttcacaacccagagtacccatatctagtttggccttgatcaaatagtggagaaatgaaaactttaagtacattggacttttaaagatttttaatttccatggttttggtagcaagtgacagagagggactcattgtccagtgtacagttgagaccgaatttctagaagataatgacaatatcctagaggcgatttttacttctaattccacaatgattcccaaagattctgcaccttggacagtaatcactgtccaggatttaaatcacaagatctttaaatcacaagatctggattcgggagaaaacgaggtcacatgtctgatataagaaaatgcaccttgagaaaaatcttcctccaataattaactacatgcttgtaacaaatggggccgtggaccaggaacagacccaaggtataacatcagcatcactgccactgacagaggcaaaccaaccctctcgtccagcccaagcatcaccctactcattggcgatgccaacgacaatgctctggttttctaccaggcctcctacgtcgtccacgtggccaagaacaatcttcccaaagcctccatagtgtgcaagtagacacctccaacctagacttgggacccaacagccaagttccctattccatcgtggccagtgacctggagccacaggcgctgtgattctaggtgtccttgagcgcacagtgcgccttcgaccaagagcagccgcgagccttcaagctcacgctgcaggcccgcgaccaggactagctcgcgctcggcgtcaacgtgagcctgcgcgtgttggtggacgacctgaatgacaacgcaccgcgggtgctgtaccccagctctggagcgcaatggcttcgcgctcttggatatggtgctgcacgccgcggagcctggctacctggtcaccaaggtggtggctgtagacgcagatgtgagacacaatgcgtggctgtcctaccacgtgctgcaggccagcaagcccaggctcttcagcctggaatgcgcaccgacgaggtgctgacagctcgcacgatgggccacaggaaagcgactcgccagcgcctactggtcgcggtgcactgcggtggacagccgctcctctcgctaccgccacgtcaccaccactaccgcccctcgtcgccgacagcctgcaggagactctgccagacctcagcgatcactctgcaaagctacagcctgaatccaaaattaatttatatctggtgattgccttagctttaatttcctttttattcttcctgattgcattgtttgtgctggttttaaagtgccgaagaccccaaaatgatcctgtctgagtctttcccacggatgtctatcccgcgctaagccccaggtttctgggtaactgtagctctatgatgccatattcctaccaggtgtgtgcttctcctacgaatccagggctgagtgaacttcttttttgaatccctacccctcaggactcaatagcagtttcactgcagaaagccccttggggaaggggatgattgtgattattctaattgcttgggcagaatccactctccaaggtgaaaaattcttgatgaaactaagttcagtcacaagcaggttttcttctagcattaaatattttcagagatctcagtaaaaagcatttctagcagcaagaccaaaggcctaagatgagaaatatttggcatggtgagcttgagggacagtagtcaggcagacaagagtatcagacatgccagagcatttggggcctgtaggtaaggagcatgttttgattatatatatttgtatgtgtttgattatattttataattttactttgatattcaaattgtactgatccaaaaataagggagggacaaatcttggccattgtagtatgagagatgtaaatttacaactcagaatccctgcttatcacttctccttcagcacacaactgtttcattttctatttaagaaacttcctctcactgcaaaaagacattctggctgataaagttagcctataatttcagtaaatctaagaatatgactaatggaagttgccagacctaaactttgaaaattattgttccactgaagagcgtcttatgactgagtgttccagtctccttctcaagctgaaccttgcttttcaaaccagattaagaacactatcataagttatactgcattttatttccctacccatgtccactgcatcattctctatagtacaaagagcttgtctcgccaggcgcatctataatcttagcactttggggcgccaaggcgggtggatcacttgagcccaggagtttgagaccagcctggacagcatggcaaaaacccatctctacaaaaaaaaaaaacaaaaattaacaaggtttagtggtccatgcctgtggtctcagctacttgggaggctgaggtgtgaggatcacctgagtctggggagattgaagctgcagtgagctgtggttgcgctcctgtactccagtctgggtgacagaattagaccctgtcccaaaacaaacaaacaaataaagagcttctctccttatgacttatttaaagcttgggaaattgttccaattcaaatgctttaaatggacttgagctaaaacagaatgtggtatatgaaatgttcttataatcaggtgattgtaaaaattgatccagataatgttagcatagcattttactgaactagtagtttacaaacacttcaaaaattatagaataacatttgcatataaaattcctcatacatttccctatcagtgaattggaagcttacaatatacaatattaccaaaaagacaaaaaaaatgaaaaggaaacagttacctttggaaaacataattaggtaaaatgggtaatatggaaagtctgaaaactgaaaaaattactgataagtcaagagaaaaggaatattagtaggaaaattcataaaagtgtgtctgactactcacagcaggtttccttattggtatgtattctgtggtccatctaagctatgttaattttattttaaatgctacctgggtattggcttctaaaaggaattcagtaaatcagataatttggcatcttcaatctagattctgatgctcacctgaaaagtctgctaaggattggaaaccaagaaaagtgaagtatctcaacagatatgtgtcacttgtgtgtactggattttttttttttttttttttttttttttttttttttgagatggagtttcactcttgttgcccaggctggagtgcaatggcatgctctcggctcactgcaacctccgcctcccaggttcaagtgattctcctgcctcagcctccctagtagctaggattacaggcatgtgccaccacgcccagctaattttgtatttttagtagagacggggtttctccatgttggtcaggctagtcttgaactcccaacctcaggtgatcttccctccttggcctcccaaagtgctgggattacaggcatgagtcactgcgcccggtcgcgtactggatttatattgtgtaatactttgctctagcagtatagtaggtgagacagtgactgtgtctagtgagcaaaaggcacttatttgacacttttgactcttcctttctacttaccttatttaaaattgatttttgcatgtggcatgatgcaccagttcattgaggtaggggttgaagttatttcccatttttttcaataccatttattaaaaatattttcctctttctgttgaatttgcttggtgcctttgttgaaagtcatttcactgatatatgtagttctatttctatattcttgatcatgtttcatttgtctattcttttactaatagcacactgtctcaattattgtagctttatagtaagtcttgctacaaagtcttactacaggacaaagcttgtaggatttttgaatgggatggcattgcatctatacctttatcagggaaagagggaaggagggaggaggatcatcttaacaatattgacacttcaaatccatgaacatggtatatatttccatttaattaggtctttaatttctctcagctatgttgtatagttttcagtgtagagaggtcatgtatatttctcattaaattgtccctacatatttgatgttttctaatgttattgtaaatagtatttttaaaattgtatcttctaattgttcatttctagtttacagaaaaatgaaaaactatgtttttatgtattctatatgcttttgaaaagtaagaggtgcaaagtgctctattcttacactatattgtgtgagaatataagtcgaaaccactctgcataagttcaggcttccattctcttcagtttgtaggttgagagaacccatccagaaacagtaaacattggtgtctgcccaagtctggtcctgggtggttcattcattcatttacataacaaatatttattaactgtctgctatatgcaaggcactgacctatggactaaggatgcagcaatgaacaaggcatatatgattcctgagttaatgggccctattctaatacatgatattttacaggtctgataaaagccaacaaggagaaatacaaaagcactaagagaaagcttatagtagggaagcttcgcctaatctgaaggtcaaggaaggctttctttttttcggaaagtgatatttagagagatgaatagattaataggatgagtagaagttatctaggtaacaaggaaagtaaaaaagaaattgtcaggcagaggaaatagcatgtgtaaagatctttttaaaaaataaaaggtgtgactcaagcaatttaaaagggctagggaggctagaaacagaaaataaatagatgaaactaataaggcagggagagccttgtaaatcacacttaaaattctggattttgttctaaatacccttgtacttaggagctattaaaatattttaaacaaggcagtgacaagatatttgaattattaagcttactctggctgctatatggagaattgatttatgagggttataaatagaaataggaagataagataggagactatggcaatattcctggtaagaaatggaagaagagctggcttggattaaaggggaggcagtggatgtagaaataaatggatgaattatagatatatttaggaaatgggttcaataagacttaataatggaataggtggaatataaatttcatgagggcagggggtgttttgtttattattatattcctaggtgtctgaaaatattgttgtgttgcctggcaagtggtagatcttcagtgaaatattattaactgaataaatacaatggataaatggggagcagggattaagagtgattcctgggtttccacattaaggaactggatggacaaagctaccatttgatgagaatggaagactaaagaatgatagatttaagagaaatcgagttgagttccagccatgttcatttgaaggatctgagaaacagtgcagatattcagtgtgtgattagacatatggtcatcattcttttttttttttgagatggagtctcgctctgtcacccaggctggagtgcagtggccctatctctgctcactgcaatctctgcctcccaggttcaagtgattcttctgcctcagcctcctgagtagctgggactacaggcgtgcaccaccacgcctggctaatttttgtatttttagtacaagacagcatttcaccatattggccaggctggtctcgaactctgatctgcccgcctcggcctcccaaagtgtggggattacaggcgtgagccaccgcgcccagccggttaccattcttttactctgagttcttccattgtgatcatctagtcagatgggtagatccttataaggctgagcataataagcttcctgatagctctacactggtatgttttggggttcatggctgagctacttttgtgttttatttatcttcctgatctctttttcactgtaagaaacatccagcacccagggaaatttgctgtctaattcatactccactcttcagactagtcctagtgttcagttttgttttgttttttttctgtgtctggaattctattaaaatgtgtcaggctgttttaatttttgttgtttaattttctttcacatgattatatgtgctccatggatttttttgtttgtttgttttttgtttttgtttttgtttaagcggggtcttgctcttgtcgcgcaggctggagtgcaatggcttgatctcggctcactgcaacctccgcctcccgggttcaagtgattcttctgtctcagcctcccaagtagctgggactacaggcacatgccaccacacccggctaatttttgtatttttagtagagacgggtttcatcatattggtcaggctggtctcaaactcctgaccctggtgatctgcccacctcggcctcccaaagtgctgggattacaggcgtgagccaccgcacccggaggaaatttttaacctcagtttttcttcaccatctgtaaaactgcatagaaggaatgtttaggataaaagatgcataacaatcataacaaaattgttgggttttaatgttatgagtacacttggaggattctatgtccacacataccttaaacatcctatagagtccttagcattttaaagttgaaaccaacagtatgaatgatggtagaattttcccccccaggaagttagaactgttccatatcttgatagagggatgggttataaggatgtacacattttccaaaactcattgaacttaagagtcttgcatgtgactgtatataaattatactttaattgaaaataaatttaagaaaataaaattggctgggcgtggtggctcacgcctgtaatcccagtgctttgggaggccgaggtgggtgaatcatctgaggtcaggagttcgagaccagcctggccaacatggtgaaactctgtctccactaaaaatacaaaaattagctgggcatggtggcggacacctataatcccagctactcgggaggctgaggcatgagaatcgcttgaacccaggaggtggaggttgcagtgagccaagatcatgccattgctctccagcctgggcaacatgaacgaaatgccatcttaaaaaaaaaaaattaaaagaaaagaaaattagcctcccccaccctcactatacctcagactcacccctgaaagatcactactattcatccctggttatgtacacttacaaacattttctgtgtgtatgcgaatgtatgtgtggggttttctttgcacaacaggatcattttacagtatatatactgttgtgcaacttgctctttccacttaatatctcaaggaatcttttctttgaatctttatagccatgtacctcaatcttagtagttttctttattttatttttgaataggaaatacatttacatggttttaaaaatcaaaacaatatactatgtatatattgagaagtctgacttccatccctatcctactcctattccacccttgcttcctcctgtcccctgtaggtaaacattttataactttattaagcatcctgtcagcatttcttatgcaaatatgtacatatatttttatttccccattttttttacaaaaagataaaatactatacaccactttatatcttcctttcttcacattatatcctttaaaaatatttccatattggccgggcgcggtggctcacgcctgtaatcgcagcactttgggaggccgaggcgggaggatcacgaggtcaggagatcgagaccatcctggctaacacggtgaaaccccgtctgtactaaaaatacaaaaaaaaaaattagccaggcgtgatggcgggcgcctgtagtcccagctactctggaggctgaggcaggagaatggcgtgaacctgggaggcggagcttgcagtgagccgagatcgtgccactgcactccagcctgggcgacagagcaagactgcaactcaaaaaaacaaacaaacaaacaaaaaagaacttccatattaatatatagaaagctgttttttttaacagttgcttagcattcctttggattattaaccagtctcataaatgagcgctattgaatagccctgtacctacatcagtttttacatatgcagtatatctttgggatgaattcccagaaatggaattgaaattgctgggtcaaagaggaaataggtgtaattttcttaggtattttcacaagaagtgttaattctaactttctgttttgaaatgatttcaaattttcaaaggagttgcaagaattgtacaaagaactgtatctccttcacccggatgcaccgggtgaattatatgtattatataattgtatctgtaggccaggtgcagtggctcactcctgtaatcccagcactttgggaggctgaggcaggtggattacttgaggccaggagttcaagaccagcctggccaacatgataaaactccatctctactaaaaatacaaaaattagccaggcctggtaccccatgcctaagggtgaggcatgagaaatgcttgaacctgggaggcggaggttgcagtgagccgagatcgcaccactgcactccagcctgggcgacagagcaagactctgtctcaaaaaaaaaaaaaaaaaaagtaaaaaagttttttaaaaagatgtatctatatatacatatttacatacacacccaagtgtgtatgtatatatgtttgtgtgtatgtacacaaacacattatttttatatgatatgatttttttatgacatgattatttttatgacatttgagagtaagttgtagaaattatgtttctttattcctaaatacctcattgtgtatttcctaacaaggacattcttttatataattaaattttaataataaaaatcagaaaatttaacatcaatgcaatataattatttagcctatagtccatatttaaattctaccataccttatagtatattttactatacctcatagtaattttttttagtccaaaatatcacacattgcatttagttgccatgtctcttttttttttttttttttgagacagggtctcactctttcgcccaggctggaatgcagtggtatgatcttggctcactgcaacctccgcctcccaggttcaaatgattctcctgccttagcctcctgagtagctgggactacaggcatgtgccaccacactcccaccacacccagctaatttttgtatttttagtagagacaaggtttcactatgttggccaggctagtcttgaactcctgacctcaagtgatctgcccacctcagctaagtgctgggattacaggcgtgagccaccatgtgtggcctagttgccatgtctctttaatctactttaatctgaaacagttcctcagccttgtttgtttatatgaaactgacatttgtaaagactagaagccatttgtcttgtataatgcctttaatttatatttgttttatgtttcctcgtgattttatatatagagtttgtttgtttgtttgtctgtttgtttgttttgagatggagtctcattcttgtcacccaggctggaatgcagtggcgcagtctcggctcactgcaacttctgcctcccaggttcaagcaattctcctgcctcagcctcctgagtagctgggattacagatgcctgccaccatgcctggctaatttttgtacttttagtagaaacggggttttgccatgttgcccaggatggtctccaactcctgacctcaggtgatccgcccgccttggcctcccaaagtgccgggattacaggcatgagccaccgtgcccggacctcatgattgtatttatttatttatttaatattattattattatttttttttttttgagatggggtcttgctctgtcacccaggctggtgtgcagtggtgcgatatcggctcactgcaaccgctgcctcccagattcaagcaattctcctacctcagcctcccaagtagctgggattacaggcatgtgccaccacacccggctaatttttttgtattttttttagtagagacgaggtttcaccatattggccaggctggtctcgaactcctgaccttgtgatccacccaccttgacctcccaaagtgttgggattacaggcgtgagccaccacacccagccttatgattgtatttagactagacatttttttggtagtatattatttagccattgctgtgtaacaaattatcccaaaacttagtggcttaaaagaagcatttattatctcataaattttgtggatcaggactgggtatagctttgctgagtgcctctgcctcaaagtcttacaaggcagcaattaaagtgtcacctaaggctattgtcttatctgaagggtcaacagaggatggatccgcttctaatctctctcacatagttaatggcaaaattaagttccttgtggattgttagactaagggttccagttccttgctggttgttagcttgaggtctacctcagttccttgccatgtggacctccatagggcaaccagcttctgttagagcaagtaaaggagagtgccagagagggcaaatgtgatgaaagccacaatctttttataaacctaattttgaaagtgacatacaaggctaggcatggtggctcaaacctgtaattccagcactctgagaggccaaggagggtggactgcttgagcccaggagttcaagaccagcctgggtaacatgacaaaaccctgcctctactaaaaatacaaaaattagctggtctggtggtgcatgcctatagtcccagctactcaggaggctgaggccagagaattgcttgaacccaggaggcggaggttacagtgagccgagatcacaccactccactccagcctaggccacagaatgaaaccctgtcaagaaagaaaggaaggaacaagggagggagggaggaaggaagggaggtagggaggcagggaaagaccgagaaagtgacataccatcatttttgctgtagtttgttcattagaagcaaaatcacttggtccagcccacactctggggagatgattttctaactccatttgtaataacttattctacttttattagttggcattatacagtaagaaagagctttcttttctcttcttatttattcatatatggctcatgtgttttttccaatgagttatattctattactaacattttttattttgacctcaaattgttttagatgttaccaataagaacctcttcaagctggttcttgtgtccttttgccataactctctcattttcttgaaccctttcttactttctgatataagaaaatattagagactcatactttccttgttccagttctgagatgaaccatttatccaaaagccttgcttcattttagtagggaatagtatttagaaactaagatctgggtgtgaggtatgctcactgctaatgggctgtcactgtttctaggccttgtcagcagacggagctaggaaaaacacacataaacacacccatatttatatttgtacacacactccctcaaaatcgtgagttcatattgatacctccagttctggttcttcctagccttccccctttccatctttgtatttttattttccaacagtaagaaccctggctcccagtgctatgaatatatttactcatttgctccatccactgcactccagcctaggccacagaatgaaaccctgtcaagaaagaaaggaaggaatgagggagggagggagagaggaagagagagaaggaagaaggaagggagggagggaaaactgagaaagtaacataccatcatttttgctgtagtttgttcataagaagcaaaatcacttggtccagcccacactctggggagatgattttctaactccatttgtaataatttattccacttttattagttggcattatacagtaagaaagagctgctgaagatttgcttgcaattggttgtctttaaactgagggtatattgtcaaagtactgtgctgaaaagttacctgtagtatagttatgtgattcattaaaataaagtttgtttctattatgtgcagttttagagttttgccacactctggttgattagtatattttctgttgcttttttgttttgttttgttttgttttgtttttgagatagggtctcgctatgtcacccaggctggagtccagtggtacaatcacagctcactgcagcctcaacctcgtgcacttaagcgatcctcccacctcagcctcccaaatagctggggctgcaagtgcacaccaccatgactggctaattttttaattatttatttatttatttatttattttagagatggggtctcactatgtttccccaggctgaccctgaactcctggggtcaagtgatcctcctgccttagcctccaagtgctggtattacaggcataagccaccacacctagcctagtattcttttttgaatatgtaaaacattaacataaagtcaaaactattaaaaaaaggtgtactcagaaaattgtcattcctcccctataccttctgcctcattcacaccacactctgtagataatcgatttcattagtttgtggtttatcctcactgtgtttctttttgcaaaacgcaaaaacaaaacctatacatatttatattttcttatgtcctcttctttcttacacaaaaggtaacacactatgtaggtagtcctggctttgaacagtttcactataaaaatatttgttactacagcttaaataacataagtctcctaaaaataattcaaattttagttaccatggtatattaactttgagtagttccataaaggacaaacttggctgctagcccttcagtccacagagcactttgaaaataacagatgagcaaaataatgtggccaatcacatgacttctttcaaagtatgtcagtgatcagtcactgtgtgcctataatttagttcatgcacagacagcaaagcatgtagttgtgttgccttccagtgataaacccacataacattttagaaaaatgtattaagaattggccagcaaagataaaagtgcagcaaagaaacaaaagtgataatgttttcagtgaaatttgaattgaacataaatggagttatagaagaaatagctgaccatgggaatgttcacactgctactttcaagaatctctagaagggcagctaaaggagcttagtgaaggtgaatttattgacatgaatgagaaaagtaattgtgatgaaaaggatgaagatgtcccagagaaagtaatgccagcaaaaacttcacattaaaggaactctcagatatttcaaagcattgaaacctccaagaataaataaaatgttggaagttgatccaaacttagaaaggagtatggcaacttgtcaagatgaagaaaaggtgcttattcctttttatttatttatttagagacagagtttcactcttgttgcccaggctggagtgcaatggcatgatctcagctcaccgcaacctccacctcctggattcaggcagttctcctgcctcagcctcccaagtagctgagattacaggcatgtgccaccacgcccggctaattttgtatttttagtagagacagggtttctccatgttggtcaggctggtctcgaacccccaacctcaggtgatctgcccacctcggcctcccaaaacactgggattacaggcatgagccaccatgctccacctgcttattccatattatatgttataggatgaaaagaggccaaactaatcttgacatgttttttacaaggaaataatcctccatggttctaatttttttttttttttttttttttttttttgagacagagtcgcgctctgtcacccaggctggagtgcagtggcacgatcttggctcactgctagcaccgcctcccgggttcacgccattctcctgcctcagcctcccgagtagctgggactacaggcgccggccaccacgcctggctaattttttaaaaaatatttttagtagagacggggtttcaccgtgttagccaggatggtctcgatctcctgacctcgtgatccgcccgcctcggcctcccaaagtgctgggattacaggcttgagccactgcgcccggtgggtctaatgttttaaattacactgtgttaaataaatattagtttgttggttttttttttagtttttttatttctctacaaatttacaaccaataagagtttttaatgctttgacaaaaaatgttaaaggtcatagtacaatcgcatttcttcccattgattattaacatcactttacatagtttcatcttgcattagcaattttgtgtgtgtgtttgtggttttaaggagcggagagtttaataggcaagaaggaagggagaagacagaaggaaggagctcccccttacagagacagagggagcggggctccaaaagaggaggtccccatctaccgcggataccagccaggtatatatgcagaggctggtggaggtgatgtctgatttgcatagggctcaggggattggtttgaccaggcatatcattcacgtagcccgagaaaaagctggccctcccaccccagccttttaatatgcaaacgtagggcgccatggatgttctaaacacgtggagatatgtggggggcagccatgtggccaggaacttgtggggcaagggcaagaaggctgtgggaatcgccaagttgaatggacctagtttctaatggcctgcatttgcatatcaaaggttgctggcctggctcctagagccggggctttaaaagaaacttttccggagatgctttaaaaaatgaaaacttcccaaggaccccttttcctgtctatctgcataaaataatttcttttattatttatttatttatttatttatttatttatttatttatttatttatttattttgagacggagtctcgctctgtcgcccaggctggagtgcagtggcgcgatctcagctcactgcaagctccgcctctcgggttcatgccattctcctgcctcagcctcccgagtagctgggactacaggcgcccaccaccacgtccggctaattttttgtattttcagtagagacgggatttcaccgtgttagccaggatggtctccatctcctgacctcctgatccgcccgcctcggcctcctaaagtgctgggattacagaataatttcttaataactcctaccacattcctccctgtggcgatatcaaactaactgctgttaggaggctttgggcgaccattgcttctggctacttcctgctgaaaaggggcgtctaatggagaacagcagctagggctcctcctggggttgatctaagggtcctcggaagaatggcgtccatgtgtggttcagtttacagcaccgtttggagtttgattgcttctaggcgagaagaaacaattcaagttatagtattgagtatacagagtccaaatatcaatacaagacatataagcaagagagtgcttaataaaggggttaaccaattccataaagaagactggaagtaattaaagagggattgtagccactcggggctgaagcccacattttccctgagcctgtcaataattttgatttgatttttaagtccctgtagatttgcctcttctttactacaggtgttaatcccaaagaagcatgtttcatttaaaaatgcattactggccaggcgtggtggctcgcgcctgtaatcccagcactttgggaggctgaggcgggagcatcatgaggtcaggagtttgagaccagcctggcctacatggcaaaaccccatctctactaaaaatacaaaaaattagccatcgtggtagtgggcgcctgtaatcccagctaattgggaggctgaggcaggagaatcgcttgaacccgggaggcagaggttgcagtgagccgagatcgcaccactgcactccagcctgggcaacagagcaaaactccatctcaaaacaaaacaaacaaacaaacaaacaaaaactgcattactaaatccaataaaaagtcctagtagactcagtgatagtaaaactttcatgcttcctttttgccagtaactattatccctgctataaggatactaattaagcaaaatacgacagcaatggaaactctgtccaatatttcagttagaaggtgctaccatggataaccctattgcaaatagtagagtgaggaaagcagttcccacaaatgtggtgtggtaggtaatttccatctaaaattttacttgccaacatatagaattcccctctgtgggcctacgaagttccttggttttattttcccaaacaaagaaacctccgggttacaggtaccttacttactttcattacctggcacaatttgcaaaataattgcccagaactagcatattgattcacattttcacattacccatccctttttcccccccaccaagctgcagaagatcaccacttgattcacaggaataagcagggccagggttagtctaaaatgtaggcaaaaagcttaaaaacaattaatgagactagggtttaatgacaaatgtatgataagctttggagcaaaatttttctctccagtcctcatttttggtaaaaactaattatgaatgaactttaatcttatacttggcctgattatttgcatgaagtgcagcaagaatggttatttctacataggacttttggattggctttgatgaaacactgttccacaaggaatttcagattagacttttaaagctgagcccagacatgggtttgtatcctctaatacctgtgagttgggttatcctctcctcttgaggtcccaagataaactcagagcttccagacctgttagaaagtgacattcttcactgaccacaggttaggaaccctgtgtggggactgtgtagacaaggtgtgaggccagttctccccaaggggcttttattggctctgcatgtcaagcttgattccttaaagggaaacacaccctttcagttaaagccttggcaaaataaccggtttttccaattgtgttctgttgacaaagaaaaatggattcttgctgcactgatgcgaacaactatattgccgtaagttaagagtacttacagatagtctccaaattttagaggaaccaggcagagaaaaatgaacatgctccaaattttgttcacagtagtataccttacttgattattaaaggccataaatagtttaaaataagtttcctttcccagtccatgcaccaaaatgatacggctctgatgagtggaggaacaacagggttcctggtcctcatgctggtttagataaaatgacacagacacatgtggagtggttttaaggagtggagagtttaataagcaagaaggaagggagaagagagaaggaagacgctcccccttgcagagacggagcgggggttccaaagctgaaagaggaggtcccccacattaacaatttttaaaataccgtacaactgcagaaaatgaggactgcctgtacatactgtttgacactttgtttttttttttaacttatcaactttattttgtttgtttgttttggttttgggtttttgtttgtttgtttgttttggagacgagtctcactctgtcagccaggctggagtgcagtggcacaatcccagctcactgcaacctccacctctcgggttcaagcaattctactgcctcagcctcccgagtagctgggattacaggtattcgccaccacatccagctattggttttggtttttgagacagggtcttgctgtgtcacacaggctggagtgcagtggtgtgatctcagctcactgcaacctctgcctcccaggctcaagtgatcctcccacctcagccttccaagtagctgggactacaggcatgcacaccatgcgcagctaattttttctattttttgtggagacggggtctcactatgttgcttaggttggtcacaaattcacagcctcaagcagtcctcctgcctcaccctcccaaagtgctgggattacaggcatgagccaccacatccagccttaccagctatattgaagtataatttatataacataaaatttgccttttaaaattatacagtgcaatgcattttgacaattgtttacatctgtgtaaccaccatgcaatcaaaatatagaacatttctataaccttcaaaagttccctcatgcccctttgcaatcaattcactacttctccagctccaggcaacaactggtctgcttcctgtcactataaattagtgttgcctctttcagaatttcatctaaatggaatcctataacatatactattttgtatccatcttcttttactccaaagttcttgaaattcattcatgttcctgtgtgtatcagcagcgtgttccatttgattgttgagcagtattgcattgtgtggatatatcacaatgtgttcattcattcaactgttggtggacatttgagttgtgtccagtttagtgctattctgaattaaagtgatgtgaacaatcatgtacaagtatttttgtaggcatattttttttatttctcttggataaataccccaaaacagaattgttttgggggtcatatgaaatgggaagtatatgcttaactttataagaagctgccaaactatttttcaaaatggtaatatcactttacattttcatgagcaatgcataaagcgttccgcttgctacattttctcaccaatgcttcctattgtcaattttttaaattttagcaattctagtgggtgtgtgatactatctcattgaagtttcaactgtttttccctgttgactagagacactgagcaacttttcatgtgttgtctatttgtatatcttcttgaagcattcgttcatctttaactgagctgaacgccttcttaaaattgagctatgggagttttaaaatatatccttgtagctgggcgtgatggcaggtgcctgtaatcccagctactcaggaggctgagacaggagaatcgcttgaacccaggaggcggaggttgcagtgagccgagactgcaccactgcactccagcctgggcaacagagtgagacttcatctaaaaaataataattatacatgtaattatatatgatttttatatatgtaatatatatattcttgatgtgagctctttgtcacatacatattttgtggatattttatcccagactatgacttgtcttttcattttcttagttgtgtcttttgaagagcagaagatgtaattttgataaagcccaatttattttttcttttatagtttgtatttcttatgtcctattcaaaaactccttgcctactgaaaacttatgatgattttctcctatattttcttttagaagttttatagttttaccatttataatttggtctatgaatccttttgagttgatgtttatgtatggtgtatggtgtgaggtaacaatgaagattcatatttttttccaaaggaatatccaattgtctctttggaaaaatatgctgagaaggctatcttttccccaccaaataatcttagcaccttaatcaaaaatcatttggccatggacatatgtaggtgtgggttttttctgggctctctgtgttagatggatagatagacagatacagatatataactgtgtttacacatatgtaactgtaaacacagttatatatctatatatccaccaacagttgaatgagaataaactattgttataagcatatatacacattgtatatatatgtgtacatatacatattgcatatgtatgtatacatatatacacacaaagtatatatatgtatgtatacatatatacacacttaaagtaatggcctccagttcgatccaagttgctgcaaaggacattatttcatgccttttcgtggctgagtaatattccatggtgtatatatatatatgtgtgtgtgtatatatatgtattatgtatatatatatgtgtgtgtgtgtgtgtgtgtgtatatatatatatgtgtatatatatataccacattttctttatccactcattagtcgatggggacttaggttggtttcacatttttgcaattgtgaattgtgctgctataaacatatgtgtccaagtgtctttttcatataattacttattttcctttgggtagatacccaatagtgggattgctggattgaatggtagatctgttttttgctctttagagaatctccatactgttttccatagaggttgtactaatttatattcccagcagcaatgtgtaagtgttctcttttccccacatccacaccaacatctattgttttttgactttttaataatggccattcttgcaggaccaaggtggtagctcgttgtggttttaatttgcattttcctgatgattagcgatgttgagcattttttcatatgtttgtgggccatttgtataccttcttttgagaaatggctatttgtgtcctttgcctactttttaatgggattgtgttttatttttcttggtgatttgttagttccttgtagattctggatactagtcctttgtcagatgtgtactttgcaaagataatattttggatgttatatttccattataatttagttcaaagtattttctaatacaccttgcaatttcttctttgacccatggattattttaaagtttgttattttgtttgtttattttgagacagagtttcactttttttgcccaggctggagtgcagtggcacaatcccggctcccagattcaagcgattctcctgcctcagcctcccaagtagctgggattacaggtgcccaccaccacacccagctaatttttttttcttttttttttgagacagagttttgctcttgttgcccaggctggagtgcaatggcacgatctcggctcactgcaacctctgcctcctgggttccagcaattctcctgcctcaacctcctgagtagctgggattccaggcatatgccaccacgccaggctaattttgtatttttaatagagacggggtttcttcatgttggtcaggcgggtcttgaactcccgacctcaggtgatctgcccgccttggcctcccaaaatgctgggattacaggcatgagccactgcacccagtccaattttttgtatttttagtagagatggggtttcatcatgttggccaggctggtcttgaactcctgacctcaggtgatccgcctgcctcggcctcccaaagtgcagggattacaggtatgagccaccatgaccagcctaaagtgtattgtttagtcaccaaatatgtaagtattacccaaatatatttgtcactgatttctaatttaattgtattgtgatccaaaaatatacattgtatagtttctattcttttaaattcgttaacatttcttttatggcacagaatatggtctatcttggtgagtgttgcttacacacaactgtgtaactgaaaactgtgtattctgcttctcgtggttgttgtatcctataattgtcaactagatcaagttagtaagagtgttgttcagtgatcttttcttcttcagtgtttactgtatttgctaatcccatccagtgaagtttccatttcatatattgtatttttcacttttagaagttccatttgactctttcatttccatcctcaattatcttcatatttttctttaaatttttgagcacatttataatggaggttttaaagtccttgtctgctaattttgtcacctctgtaattcctatgatgattttcttcctggcttggggtcataatttgttgcttatttgcatgtctaataatgtttttattggacagcagacattgtaaatgttatatttttgagtgtttggattttgtctttctttaagaactattgcagtttgttttggaaggctattatgttttttgcagatcaggttgatcttttcaaggcttgtttttaagctttgttaggacaggtctgtagtaacttttgccttgggctaatttagacctaccacttaattctgacttttttgattaatctgagtgttcagcagggtctctttattatggctaaatgaaattcaaacattttccagccctatgtgaccatcaagaattcagctaatagctccctggcagttcttcgcccagctgcagaaaagtgtcagtgcactctatgtatgctcagattattatttagccaaagacttggggatccatattaatattcctggagttctttgtgtagctccattctctttagtactctatcccataaattctggctgcctcaatctcctaatctccccaaactctaatatctattcctcaactcagcaaaaccatggtgttattcttggatttcccctttcctgccccacagtctgaaagttgtctccaggcaaaaaaaatggagatcctagtttgcggatcctcatttccttctccttttttttttttttttttttttttttttgagatggagtctcgctctgtcacccaggctggagtgacgtggcgtgatctcggcttactagaaactccggctcccgggttcatgccattctcctgcctcagcctcccgagtagctgggactacaggtgcctgccaccatgcccggctaattttttgtattttgtttagtagagacggggtttcaccgtgttagccaggatggtctggatgacctcgtgatctgctcacctcggcctccaaaagtgctgggattacaggcatgagccaccgcgcccggcctgcttctcttctcttatgggttagaatcctgcactgtcttttgaacaaatgtctaaaagcttttatcacacattttgatccacttcccagttgttatagtggtatatctggtttcacatgactgaaaggaaaagttttcaccttgctttttgtactaataatatatcctggaaatcattctatataaatttatagaaatcttcatttttaaaatagcttcataaaactccattgtaaaaaccaggtgcagtggctcatgcttgtaatcccacactttgggaggccaaggcgggtggatcacctgaggtcaggagttcaaggccagcctggccaacatggtgaaactccgtctctactaaaaatacaaaaattagctgggtgtggtggtgggcgcctgtagtcccagctacttggaaggctgaggcaggagaattgcttgatttcaggaggcggagattgcagtgagctgagattgcgccactgcactccagcctgggctacagagcgagactccgtctaaaaaaaaaaaaaagcaaaaaaaaaaactccattgtatgtgcacatatcattatctgttcaacccatctatgacttgtcatttaggtagtttccatccaatatttttgcaatataaaaaatgctaatgaagaacctgagatatatatatatctatatatatagatatatatgtttgttgttgttgttgttatttttgaagtatgtacgtataataaattcctaatagtgtgattgctgcatcataaggtaaaggcatatgtagttttgttaaatatagctattccccatcttgcattcctacaaatagatgagaatgtccattgtcccatagtctcctttgcagagtatattgtcaagctttttaattgttgccaacctgatgggtaaaaagatatctccaaataattttaattaaaatttctcttattatgaatgaggttaaatagtttttcatatgtttaaaagccagtttatatctttttgtttttttagagacaggaatcttgttctgttgcccaggccaaattgcagtgatgcagtcatagctcactgtagcctcgcactcctgggctcaagcaatcctcctaccttagcctcccaagtagctaggactacagatggatgccaccatgtccagctaatttttttatttttttgtagagatgtgaggtctcactatgttgcccaggcttgtcttgaactactggcttcaagtgatcctcccacctcagcctcccaaagtgctaagattacagccatgaaccaccacaaatgaccctatatatttttttgaattgtctgttcatgtcttattttcatttttctagtagttttttttttaagtgttttagcctaaatttgtaaaaagtttaggggatatatgaagggactctaaatgtttatgaagaaatttaattaaaagataaaaataaaaatataagctttatttttcaacatgagctccatcaagttcaaggcacttttgtaagcaatgatactagccatttagttcacccctaaagaactgagagtcctgggaatttagccatgtcaatgcagtattttttatattggttactgaagaaaaaatgggtgccctttaaagttgtaagattaggaacaaaaacaagtcagaagaagccaaatcagcactgaaaggtgggcacttaatgattacccaagaaaactctcaccaaattgcccttgcttcatgagaggaatgagcgggagcattgtcgtggtcaggaaggattctggggaagttttcccaggcattttttctgctgaagctttggtaactttctcaaaacactctcataataatcagatcttatcactctttggccctccaggaagtcaaccagcaaaatgctttgaacatcccaaaaaagcgcttgccatgacatttgctcttgaccagtctgcttttgcattggtcaaatgccaccacttccacctcttgtgctttgttttcaggatcagactggtaaagtcatgtttcatctcttgttacagtttttttttttttaagaaacccttcaggatcttgatcacatttgtttaaaatttcaactgaggctgggcccagtggctcatgcctgtaatcccagcactttgggaggccgaggcgggcaaatcacgaggtcaggatttcgagtccatcctggctaacatggtgaaaccccatctctactaaaaatacaaaaaattagccgggcatggtggcaggcacctgtagtcccagctactcgggagggtgaggcaggagaacggcatgaacccaggagacggagcttgcagtgagctgatatcatgccactgcactccagcctgggcaacagagtgagactccagctcaaaaaaaaaatcaagtgaaaactctggtcttaaactgcagctgatctattttatttttattttttttcagacacagccttgctctgttacccaggctggagtgcagtggcaccatcatggctcaatgcagccttggcctcgtgagctcaagcaatcttcccacctcaggctcccaagtagctgggactacaggcacatgctaccatgcctggataatttttttgcagctaatctagatgtaatggttttggcacccatctaatggaaagtttgctcaactttaatttttcagtcagaattgtgtaagctgaaccgagatgtctatggtgttggctattgtttctgctgttaattgtaggtcttctttaattagagcacagacaagatcattttttttcctcccaaattgatgtagatggtcttttgctgtgggcttcatcttcaacattgtctcatcccttcttaaaacaagctagctacttgtaaactgccgttttctttggagcattgtctccataaacttttcacaaaacatcagtgatttcaccgttcttccactcaagcttcatcataaatttgatgtctgttcttgtttccattttagcagaattcatgttactctgataggggctcttttcaaactgttatcttattcttcttagtgcctcaaactagatcctattcagacatggtataacaagttagtatgggtttattttggtgcaagaaatattttgaaatccacacatttttttcataatatgcattttccatgaagtttttgaaaactccttgtattaggaatattagtcctttgtccagtaaacagactgcaaatattttctcacagctcatcatttaccttttggcatttttttgcaatgcaatttttttccctttgtttttgttttttgtgtaatgaatcaatgttttcttttttttttttttttagaccaagtctcactctgtcacacaggctggagtacaatggtgcaatctcagctcactgcaacctctgcctcccaggttcaagtgattctcatctctcagcctcccaagtagctgggattacaggcacatgccaccatgcctggctaatttttgtatttttagtagagatggggtttcaccatgttggccaggctggtctcgaactcttgacctcaagtgatccactcacctcggcctcccacagtgctgggattagagacgtaagccactgcccccggccaaatcaacgttttcttatattgcatttaggttttaagtcatagttagaaagcctttccccacacctaggttatagaaacattcattacttttttcttccagtgctagtacttgcatggtttttggtttccacatttagatccctgatctaattggagtttattcttttgtgtgctgagatatggatctgattatatcttttttcccaaatggctatccagttgtcccaatgccatttattaagcacttcatctttgtcccagtgatttgagatagcatctttatcatgtaccaaacttctatagtgccagaagatttttattttttttagacagggtctggctctgttgcccaggctggagtgtagtggcacaatcccagctcgctgcaacctccgcctcacatgctcaagtgcccgcacctcagcctctcaagtagctgggactacaggcacatgccaccacaccaggctgatttttatatttttttgtagaatgagatttcaccatgttgcccaggctggtctcaaactcctgagctcaagaaatccgcccacctcagcctcccaaaatgctaggattacaagcatgagccaccacacccggctgccagaaaattttaatgatcagaaaaccacaattctttcttcctctgttatatgttgaagtaaaatacttcatttagaaaactaagccgggcacagtggctcacacctgtaatcccagcactttgggaggttgaggcaggcagatcacctgaggttaggagtttgagaccagcctggccaacatggtgaaaccctgtctctgctaaaaatagaaaaatttgctgggcatggtggcgggtgcctgtaattccagctacttgggaggatgaggtaggagaattgcctgaacctgggaggcagaggttgtggtgagccgagaccacgccattgcaccccagcctgggcaacaagagcaacggtaaactccatctcaaaaaaaaaaaaaaaaaaagaaagaaaaaagaaataactcagccatacaaggctacccatttggtgagaactaataataagttagatagcaaggtaatagcaaaatgtgggtgcaaaattaaagcaagttatttctgaggagaatgtaggtctcatggaagattttcatgtggacaaatttagtaaattttttgcaggtagtttcctgacatatttaacatttgtgatatagtaaacaataagaaggtactaaaggctgggcgcggtggctcacgcctgtaatcccagcactttgggaggccgaggtgggcggatcacaaggtcaggagatcaagaccatcctggctaacacggtgaaaccccgtctctactaaaaatataaaaagttagctgggcgtggtggcgggtgcctgtagtcccagctactcgggaggctgaggcaggagaatggcgtgaacccgggaggcggaacttgcagtgagccaagatcaagccactgcactccagcctgggcaacagagcgagactccatctcaaaaataataataataataataaggtactaatatgatccagactagaagagaatagcactaaaatgggagatggggtaaacctgtggttttttttaccttaggcttttgacttccaaaattattgtttttgctgggtgcggtgggtcactcctgtaatcccagcactttgggaggccaaggtgggaggattgcttgagcctaggagtttgagaccattctaggcaacaaagcaagaacctgtctctaaaaaaatttaaaaattagccagaaatggtggcacatgtctgtagtcccagctacttgggaggctgaggcaagaggattgcttgagccttttgaagttgaggcttcagtgagccatgatcaccccactgcactccagcttgggcaacagagcaagaccccatctcaaaaaataaaacaaaatagactgggcacgatggctcacgcctgtaatcccaccactttgggaggctgaggtggatggatcatgaggtaaagagatcgagaccatcctggccaacatggtgaaaccccgtttctactaaaaatataaaacttagctgggcgtggtggtgcacacctgtagtctcagctactcgggaggctgaggcaggagaatcgcttgaacccgggaggtggaggttgcagtgagccaagattgtgccactgcactccagcctggcgacagagtgagactctgtctctaaataaataaataaataaaacaaaataagtaaaataaaataaatgtttgtagttccaaaatattttgatgacataatttcttcttgttctaataaaactacatatgcattggtcctatgacctagtaatcacactattaggaatttatcataaatacacacctcaaaaattacaaaaatacatatataccagcttatttattacagcgttatttgtaattgcaaaaacattgtagatagaatggaggtcacataaaacttattcttaagattcagaccgggtgcaatggctcacgcctgtaatctcggcactttgggaagccgaggcaggcagaccacccgaggtcaggagtttgagaccagcctggccagcatggtgaaaccccatctgtaccaaaaatacaaaaattagctggtcgtcgtggcacgcctgtaatcccagctactcgggatgctgaggcgcgagaactgtttgaaccccggaggcagagactgtagtgatctgagatcatgccactacattccagtctgagcaacagagcaagacttcgtctcaaaaaaaaagatcatagatcatcttatcaaatcaaagtatgcaaaatattcaagtaaacttcagataaatatgaaggctaaaccattcagcttcttcaccaaacccttgaatgtcccacctgtctaaatggagatacatgtttgtttgatttattggttaactgtttttattccatttttcctcaaatgatcccataatttgaccttaggaagctgttcaaatagacacattaggttgaatggaaagactactcgatgatatttaggattttaagaggattttatgtattttttccttgtgtgcaataatttaatagcatcttgaataggattttctgatattactaaccctctgggaataatattaggtaattagacagttagctaatattaaaatatgtatcaggtaatatttattgagagtttcctctgtgccaagcaggatcaacttcataggcaggcgacctgtgcggggacacagggcttcatgcttagataggcccccttgctttgaaggcccctaccctttggttagggctctgctgttaccatcttgaaattcttaataatttttattttatttttttgagtcagggtcttgctctgtcgccctggctggagtgcagtggactcactacagtcttgaattcctgggctcaagcaatcctcccacttcagccttctgagtagttaggacgacaaacacacgccaccatgctcagataagttttttgtttgtttgtttttttgtttttgtttttgttttttgtagagatgggactgtccctatgttgctcaggctggtctcaaattcctggcctcaagtgatcctcccacctcagcctcccaaagtgctgggactacaggcatgagccactgtgcctggtcaatcatttttattaacaagcccaagccctcttttttttttttttttttttgagacagggtctccctctgttgtccaggctagagtgcagtggtgcgatcttaccttcactgcaacctctgcctcctgggttcaagtgattctcctggctcagcctccctagtagctggaattacaggcacccacccccatgcctggcaatttttttgtatttttagtagagatggggtttcaccatgttggcaaggctggtctcaaactcctgacctcaagtgatccacccaactcggcctcccaaagtgctgggattacaggtatgatccactgcgcccggcctccaagccccctatttttattttgcactgaccctacaagttacgtagctaggcttagttatgtttttagcaaggaaagtgtataatctcatgtaccttttgaaagattactcaggtctctgcatgtgaaatggaatttagggaatgcaagagagggagtaaaaataacagcgaggaagctatgatagcatttaaggttgctttgactcaggggtagcagtagatagggtaagtaattgatagtttcaaaatatattttgggagtagtaagcattggtatggattagtaatatactggatgtggggatgcagaaaaaaatattaaaaattacttctgaaattctggctggaatagaagtgccacttaccaggtaaggaaggttggagacataacatatttgagggtgtggtcaaaagatgagtttgacattatgctatgtcatataaaagacatataaaagactacctattttataattcctttttaataaaatattcagaaaaagcaaaactgtggttgcctgaggctgaagctaggaagattgactacagacaagcatgagggaaattttgggggtgatgagagttttctaaaactggattgtggggttggttgcattactgtataaatttattaaaaatccctgcatcgtataggggcactatattgtatgtagaaagctgtgaaaagattttaaaaatgattgacatgtctgtggttatatcaatgagtactattattattcccattttatacataaagaaaataaaagagaagttaaaaataaaagtttcatggttacatagctactaggtgtaatatccagtattggaatttgaatctttttgacactaagaccttactctcgatcatataatacattcactttctattttaaagttatattatagccgggcacagtggctcacacctgtaatcccagcactttgggaagccgaggcaggcagatcacgaggttgggagatcgagaccatcctggctaacacggtgaaaccccgtctccactaaaaatagaaaaaattagccaggcgtggtggcacgcacctgtatcccagctactagggaggctgaggcaggagaatcgcttgaacccagaaggcagagcttgcagtgagacgagatcgtgccactgcactccagcctgggtgacagagtgagacaccatctcaagaaaaaaaaaattatattataaatgctgcatctcattggtcagaagctctcttgaaattataaaacaaagaagaaaaaagataaagactgggaaattgtgttgaatcagtatataaatcctgtatactggtccttccatttcccctagaaataagtgatacaggccaggcgctgtggctcacacctgtaatcccagcactttgggaggcggaggctggcagatcacctgaggttgggagttcaagatcagcctgaccaacatggagaaacccccgtctctactaaaaatagaaaattagctgggcatggtggcacatgcctgtattcccagctactcgggaggctgaggcaggagaattgcttgaacccaagaggaggaggttgtggtgagccaagattatgccattgcactccagcctggggaacaagagtgaaactcaaaaaaaaaaaaaaaaagaaagaaaaagaaaaagaaagaaggaaggaaggaaggaaagaaagaaagaagtgatacaacaagttacagcatctttgtttattatccactgtgagttgtattaccacactttacttggctctttggcaaactatattatctcttcagatcactagggctaggaaggcccactggtaacttgaaggagtaaatgtatcttctaaaaaatgcttacttccagggagattggatccacacaagtgaatacatatatagtccttagtgtatgctatgattattttactatgtcagtagcataaagattgctatattaataagcattaagtgcctgctgtgctagacagtgaggatgcaagtggccaccaaaatagcatggtccctgccctcctggagcttctttttttcttcttcagtgggggaagcagatactttgcttatgcaaaaataattataaaatttaaagttgtgccaagttcaatggaaaaaatataaggtgttctgagagagcataacaaaggatcctggttttaactggggcctaatggaagacctctattaggaaataacatttaaactaagaccagacagacctgtagaaattagcaaagcaaagggagggaggaaaaagcagctttcctggcaaaggaacaatttgtgtgaaggccctgagacagggaagggctggggttctgaccaccctccaagtggtgcaatggaatatagtgagagagggagaagacatgagaacttggatactatgcaaaggatttggtattttaattcaagagcagtatgatgctactgaggagcagctggacaattgtgtgatccaattaaaattttaggaagatgaacctcgctattgtggagaatgcatacacaagggttctgttggttcatgaagaggtcttaagaaaactatgagctgggtgcagtagctcaggcctgtagtcccatctacttagaagtctgaggcgggaggatcccttgagcccaaggagctggaagttacagtgagctatgattattccactgtactccagcctggatgacagagcgagatcctgcctcagaaacaaaaaccaaaaaacaaacaacaacaaaaacaacaacaacgaaaatctcagaaaactacaggccttattatcaagaaaatgacaggccttattattgagaaaactacttacatttttaaaagctgattttcaaaaaccagattgtgaattaagtgatgctgaataggggaaaaaaagactgataaaccagtgtatctctgaataacccactagatcagtgcttgtcaaactttaatgtgttttcaaatcaccctgatgttttgttaaaatgtaagtcatgtctcagtaggtctagaggagggcatttctgcatttctaacaagctccccggtgatgcctagaccattggtcctcacactttgagtagcaagtgattgggctatactctttattctaaattctaaatgtattctatcttctaatgcctatcagccctcttgctggtctggctaattatcaaacttgagcatttaaaactgggggttttcagagattaattgaagtgttaaagacatggaaatataggtcacatatggcttttcatctcttccggaaatatcctatatatccttacttcttttctacctacctaacctatgtgcctaccccttcacttatgttcaaggttctattatacttcaaaaggactctatgcaatcaaagtgatgtccaagacaaatatacagaaatagtatgaggctctaacactttacatctaatggagtggtttgcatcattaattgaggcttactctgtgccaggcactttacctgccttcttcatttaataggataggagcaggaactcttagaggttcatttcttgttcaaggatatacatctcatctctggcttatatcacagtggactcttttattcactatcctaatcattataattttgtttggtgacaacaattctaaatgcagaaaagttaaggctctttattctgtgactaaaggctttgtattttctaaagatttgtggagctttgctgccattatttcaataattttataaagatcctaggtggtaaataggcctggctttttttctttttgaaatcttctccgtcttcttcttcattagcagtgcaacttcttgtggcatatggtacccaagatcttgggaaaaggattgatcaagtaaagggaaacgatagagagagtgtgctctacaactgagatcatgctccttgtgaaagacagggtagggaaatttcttattgctccctggttcttaagaaatgagagctaacaatgacatccagttttaaaagaaataaaatctgaattgtacttttaaattttataagccagagttaaaccaatagattgtaactcctgctaatttgatagtagctccagataatgaggaagtgacagggaatgctaatttcatttggtaagagataaaactgaaattattaatgtctccacggaaatgctaaatgcctccttacaagtagggtccggctaattgtctgtcttccaacaagccagatttgttggtgtttttccagacaatgttgtgtagttttcggtttggttcgatcccctttcttgtgatcaaagaaagtgattcaaatgtttaatgagtcttgatttggattggagacttgcagaacggctagcctcacagccccaaggctggctttccctaaggtaggtttcctatgcaccgatactggcaaggcgctttggctggaaactctggaaggaagccaaaggaaagtgaagttcctggcgctagcgcgtgtcctgctcagagagcccggcgctagctcattcttcgtgcagttattggctgggactctgtgtgccgctgtcggccaatgaagacgctggagatcgggcccctgcccgtcccctttctgcgccccgggatgaggcagagactgaacagccggcgagcaaatcaacggcatccagaaagccatgtcggactcggcgcccagcgcccaagcgctaacccgctgaaagtttctcagcgaaatctcagggacgatctggaccccgctgagaggaactgcttttgagtgagatggtcccagaggcctggaggagcggactggtaagcaccgggagggtagtgggagttttgcttctgcttggtgccttgaacaaggcttccacggtcattcactatgagatcccggaggaaagagagaagggtttcgctgtgggcaacgtggtcgcgaaccttggtttggatctcggtagcctctcagcccgcaggttccgggtggtgtctggagctagccgaagattctttgaggtgaaccgggagaccggagagatgtttgtgaacgaccgtctggatcgagaggagctgtgtgggacactgccctcttgcactgtaactctggagttggtagtggagaacccgctggagctgttcagcgtggaagtggtgatccaggacatcaacgacaacaatcctgctttccctacccaggaaatgaaattggagattagcgaggccgtggctccggggacgcgctttccgctcgagagcgcgcacgatcccgatgtgggaagcaactctttacaaacctatgagctgagccgaaatgaatactttgcgcttcgcgtgcagacgcgggaggacagcaccaagtacgcggagctggtgttggagcgcgccctggaccgagaacgggagcctagtctccagttagtgctgacggcgttggacggagggaccccagctctctccgccagcctgcctattcacatcaaggtgctggacgcgaatgacaatgcgcctgtcttcaaccagtccttgtaccgggcgcgcgtcctggaggatgcaccctccggcacgcgcgtggtacaagtccttgcaacggatctggatgaaggccccaacggtgaaattatttactccttcggcagccacaaccgcgccggcgtgcggcaactattcgccttagaccttgtaaccgggatgctgacaatcaagggtcggctggacttcgaggacaccaaactccatgagatttacatccaggccaaagacaagggcgccaatcccgaaggagcacattgcaaagtgttggtggaggttgtggatgtgaatgacaacgccccggagatcacagtcacctccgtgtacagcccagtacccgaggatgcccctctggggactgtcatcgctttgctcagtgtgactgacctggatgctggcgagaacgggctggtgacctgcgaagttccaccgggtctccctttcagccttacttcttccctcaagaattacttcactttgaaaaccagtgcagacctggatcgggagactgtgccagaatacaacctcagcatcaccgcccgagacgccggaaccccttccctctcagcccttacaatagtgcgtgttcaagtgtccgacatcaatgacaaccctccacaatcttctcaatcttcctacgacgtttacattgaagaaaacaacctccccggggctccaatactaaacctaagtgtctgggaccccgacgccccgcagaatgctcggctttctttctttctcttggagcaaggagctgaaaccgggctagtgggtcgctatttcacaataaatcgtgacaatggcatagtgtcatccttagtgcccctagactatgaggatcggcgggaatttgaattaacagctcatatcagcgatgggggcaccccggtcctagccaccaacatcagcgtgaacatatttgtcactgatcgcaatgacaatgccccccaggtcctatatcctcggccaggtgggagctcggtggagatgctgcctcgaggtacctcagctggccacctagtgtcacgggtggtaggctgggacgcggatgcagggcacaatgcctggctctcctacagtctcttgggatcccctaaccagagcctttttgccatagggctgcacactggtcaaatcagtactgcccgtccagtccaagacacagattcacccaggcagactctcacggtcttgatcaaagacaatggggagccttcgctctccaccactgctaccctcactgtgtcagtaaccgaggactctcctgaagcccgagccgagttcccctctggctctgccccccgggagcagaaaaaaaatctcaccttttatctacttctttctctaatcctggtttctgtggggtttgtggtcacagtgttcggagtaatcatattcaaagtttacaagtggaagcagtctagagacctataccgagccccggtgagctcactgtaccgaacaccagggccctccttgcacgcggacgccgtgcggggaggcctgatgtcgccgcacctttaccatcaggtgtatctcaccacggactcccgccgcagcgacccgctgctgaagaaacctggtgcagccagtccactggccagccgccagaacacgctgcggagctgtgatccggtgttctataggcaggtgttgggtgcagagagcgcccctcccggacaggtaaggtttagcaagtcatgcttgaccctgttagtgcttttttattcctacatcatattgaggaaggaatggagctgtttttttagtgatgaagatgttttcctggtgatgcattcacactttcaactggcccttcctagatcaaagttagtgcctttgtgagatggtggcctgccagagtgtggtttgtggtcccatttcagggggaagatacttgactcatctgtggacctaattcacatcctcagcactcttttgctatcacaactaaccaatcttgctaagggatggttaagctaaaacacaagatctcagcgatcagagtttagcttggtatcatttacattaggaataagctgctggatacctctaaccagtggcagcttctaggaatacaaaaactacctcattcctccacctttcaagtgattgtgacatttgtattaaaactaatagctttttgataattttcctttgtttatacagatcgtgtacctcattctcagataattttttatgaatgaaatgaaattccaggcatcctttaaattttatttcaagcattctactggaaatgatgtgcaccctgcttacaaaatatttttaccttataacagtaatgcatgtttgctagaaaattcagaaaatacagaaaagtatttaaaaaattaaaactataatctccaaacccaaagataaccatttttaattataaaagtaataatttatttcaaaaataaatctaggcaacccaagaaaacataaagtagccagactcagtggtgtgcacctgtagttcttgctgctcagtgcctgaggtgggaggattgcttgagcccaggagttctgggctgtggtgcactatgctgatcaattgatcaatccactgtctgcactaagttcagcatgaatacagtgacctcttgggagggcaggaccatcaggttgcctaaagaggggtgaactggcccaggttggaagtggagaaggtcaaaactgctgtgctatccagtagtgggatgacatctgtgaatagccactgcactccagcctaggcaatatagggaaaccatgtctctttaacaataacaacaacaacaacaacaatcccagaaactacaaaaggagagtctttttggtgcctccagtgttagtccctgtccttccagccttatttttcttaagtatatgcacaatgtgaaaggtagataaattcatatccttagacaggtaaagcattcattaattcagggtggtatgcaaggatactatccaaggcatggtatccatgcaaggtgactgcaaggcctttgccctggagagaaccctatacatactctcaactgtaggagaaacactgttattttgttactcagtgcatcattgctatcaactcttggatttggcagttagtcaaatgaggttctaccatttaccaactaggagtctgtggccaagttactcaatctcctttctaagcctcttcctcatatgcaaaaagggaataataagtgttttataagattcatgcatgatataatgtatgcaaagtgtttagcatggtgcctggcatatcataactgttaaacaattattagccagctcctagcattttgggaggctgaggcaggcggattgcttgaggccagcagttcaagaccagcctgagcgacatagtgagatcctgtctctacaaaaaaaaaaaaaaatgtgttttcattagctgggtgtgttggcatgcacctgtggtaccagctacttgggaggctgaagtgggagaattgcttgagcctgggaggttgaagctacagtcagctgtgattgcaccactacacttcaaccatggcaatagagtgagaccctgtctcaaaaaaaaaaattatcagctattactataattatttttattagttcctcactcacctaaaatctcaaacacaccttagaaatacacatatgagaacaaccaaaaatgacaaagtagaagcacatatgaaaaggctaagaaagcatgaaagccagcaagaaataactgccgctcttctggtcagcctggaaagcaactggcattttccctagaacaatgttttcaaacttggttgcacattaaaatcacctagagaccttttaaaaattctgaaacccaggccacaccccgacaaatgaaagcacagtctctgggggtgggacataggcatcattttttgaaggtccccacttgatcctaatgtgcagacaaatttgaaaaccacagctttgggaggctgaggtgggtggatcataagatcaggagtttgagaccagcctggccaatatggtgaaaccccgtctctactaaaaatgcaaacattagctgggcatggtggcgcatacctgtagtcccagctactctagaggctgaggcggaagcatcagtgagggagaatcagtgaacccaggatgtggaagtttcagtgagcccagatcacaccactgcactccagcctgggcgacagagcgagactccacctcaaaaacaaaaagaaagaaagaaaaaagaaaagcagtactctggaacctaccaatccatcatttagcatatttgtgaagtaaagtgttattctggtatttgcagaaccagaatccagctttattgggccaggcccaatttttttaaaaaacatggtaaggtctcccagccttaaagtattacatagcatagctctaaaagatcactgtaggaagacataaaatggtatttcagtcatctaagggaaaaaccttcctaaagcactagcccctggacaactattatttaaacatctacagctgttcaatagatattgggttctttttggagggatgtgacaaaattcttgtataattagattgtgatgatgattgtatcagtttagtacatgtaaatacactgaaaaccattggattatacactttaaatatgtgatttgcatggtatgtgaattatgtctcagtaaaaatctagagatggggctgggctcagtggctcacgcctgtaatcccagtacttagggaggctgaggccagcggatcacctgaggccaggagttcaagaccggcctggccaacatggtgaaacttcatctctactaataatacaaaaatcaggccgggcctggtggctcacgcctgtaatcccagcactttgggaggcggaggcgggcggatcacgaggtcaggagtccaagaccagcctggccaacatggtgaaaccccgtctctactaaaaatacaaaaattcaccaggcgtggtggctgaggcaggagaatcgcttgatggtggaggttgcagtgagccgagatcgcgccactgcactccagcctgggtgaaagagcgaaactccatctcaaaaaaaaaaaaaaaaaaaaaatcagccagatgtggtggcaggtgcctgtagtcacagctacttgggaggttgaagcaggagaatcgctttatctcaggaagcagaggttgcagtgagccaagatcatgctgttgcattccagcctgggcaacaagaacaaaactcactccatctcaaaaaaaaaaaaaaaatatctagagatgggagaatcatatggctggcataaaaaggtcaagtcaaagatatgtaagattaaggctttacgatgctccagttctagtaaaacagaccaggtacttgttttggtgtgaaattgccaatataagtatagtactgtacatattagttgtttagcttaggtaagtcttttaatctctttaaactccagtttcctcatctataaaataaagagaatatctactttgcaaacttgttgtgagagtgaaaagtaatgcatataaagtccctgtatggagcaagtactcaataactatttgttgaactaaaaatgataatactgatattcaccatttattagcatccctatgtgccagacactgtaaacaattaaaagttatcattctggtacccagagtacagtatgagacagacatgcaaaaaaaaaaaaaaaaaaagataatggagatctgcatagcataagatgcagtgggaccaaacgggaaaaaacacctaaatgagcctggagaaaggaagaaatgatagaggtggtgatgcttgagctatgatctaaaggttgagtagtagcttgtcagacagtaaaggggaaaggacagggcagggaggggccattgcaagaaattccatgcagagggattatggtatttcattatcactgaaccttaaactgtgtgtgtggccgggtacggtggctcatgcctgtaatcctagcactttgggaggccaaggtgggcagatcacttgaggtcaggagtttgaaaccagcctggccaacatggtgaaacctcatctctattaaaaatacaaaaaattagccaggtgtggttgtgggtgcctgtaattccagctacttgagcagctacttgagaggtcgaggcaggagaattgcttgaacccgggaggcagaggttgcaatgagctggtgtcaggccactgcactccagcatgggcaacagagagagactccatctcaaaaaaaaagtgtgcgtgtaaaacagacagtctttgtaggagatgaggtgaagcaagtaggcaggagttagatcctgagttacctttgggccaagccaaggagtttttattttattccatatagatgacagtcactgcagaaatttgaactgatatgcatatatcatgaggtttttttgttttagaaatattattctgtcagtcataagtgaagggactggggacattgggactggaggcaaagagatcttatctctttgcaatagtttgaaagctattgcaatatttgaagagaagattgataaatgcttgaaccagcacagtggcagtacagatggagggagctgactacaataaaatcatcaggacttgttgattgacatgatataggaagtgagggacagggatgagtcaaggctgatccccctagatcctgactaaggaagctgggtggttgacagtgccattcacagagacagtgaattctggcataaacacctaataggtcaggctggtttacacctccatcattcccatgggagaaggtatagaggggtgtgtgtttgtgtgtgtgtgtgtgtgtgtaaaagaacacagaaagccagattcctctttttgacaccagaatattggttcccaccatagtcaaaaggatattcctgaggatcgaggcttggaaaaatattggggaaggataagaactccagttgttgctgctttttttggcagccagtgtaacctaggtaaggacttggttgaattaagaaatttcatgtccagatcaggatggatttttctatttctctgagctctggtgtgtttcccactcagattgcaggtcgtaggtacctacggtgtgaattgtgttgtgtttctgtgcttgtgcaagggagtagctaggttgctgggaggtctggatgagggtgggggtggggtgagatcaagtctccagctccaagaggtcccctggggctaagtgaaaagcttgctcttttgaaatggtcttcgttggtaattaacaaaagatcaagaataccttggtgtcagataaagggaatttgtaggcacaatgctgttggtagctgatctcaatcattcaaggaagctattaaatctatgaacattagcattctgccaggtaaagagatctggtccttagcacctcccagacacactgattctttactgttttgaaacatctccctctcctggcttcctccaccccgcttccatactgtccttgaaatcaatgaatggtaatttagtgtatctagtgtatcactagcaaatgtctgaataagaaaggtttggtttccgctgtgtctcctgttacaatgagaacatgtactgcataaatttaattggctacgttaatgtgtaagccttttctgcaaagagatggatccgtttctgaatattctgcagaagggcagagttttgagtatatggcagtggttctaattagcagttgctccaatacaatcagactgagacggaagctactcatttagaatactggttgatgacaacactggcttgaacaaagtgaccactctccaatggctactctccctctcagtgggccgcaggttgctagggctcaggctgtggctgttttccccgccgaaaaggggcggggtcagtcggtgtgttaggaaaaaaaatgtatatatatatatatgttgtctgcctccccacagagataacaacccgtggaaaaacatgccgttgagcgggaggaaggcgaaaagataggctgggttttttggggggtgggggagcgtggaggatagggtgggctttttcccctccaatgctgcgacgcattaaccctgctgctgttgggacgttctctgctcagcctattggctgagcccgggagccgctgtctgccaatcgggtggtgaaaggcagacaaatctaccccgccaccagcaaaaacggcgcgtaacccttgcggcgccggccgaaccgcgccagagctggcgcggggaaagggagataggtgtctccagctgctgtggctgtttggggcgggtcggcttcatccgcgtctcaggagcaagtagagaattagcgggcggcagcaatgctccgcaaggtgagaagctggacagaaatctggcggtgggctacccttttgttcctcttttaccacctgggttacgtttgtgggcagatccgctacccggtcccagaggagtcacaggaagggacttttgtagggaatgtcgctcaagatttcctgctggatacggacagtctgtcagctcgcaggctgcaggtcgctggagaggtgaaccaaagacacttccgtgtggatttggacagcggagccctgctcatcaagaacccaatcgaccgagaggcactgtgtgggctcagtgccagctgcatcgtgcccctggagtttgtcaccgaaggtcctttggaaatgtaccgagcagaggtagagatcgtagatgtgaatgatcacgccccccgttttccgcggcagcagctggacttggaaattggggaggcagctcctccaggacagcgtttcccgttggaaaaggctcaggatgcagatgtggggagcaattcgattagcagctataggctgagctccaatgaacactttgcactggatgtgaagaagcgcagcgacggcagcctggtcccagagctgctcctggagaagcctttggatcgagagaagcaatcggactaccgcctggtgctgactgctgtcgatggagggaacccgccgagatctggcaccgcagagctccgggtatccgtgctggacgtaaacgacaacgccccagccttccagcaatccagctacaggattagtgtgttggagagcgcaccagcgggcatggtgctcatccagctcaatgcctcagacccggacctgggtcccagtggtaacgtcaccttttatttcagtggtcatacccctgatcgtgtaagaaacctctttagcctgcaccccactactggaaagcttactcttttggggcccctagactttgagagtgagaattactatgaatttgatgtgcgggctcgcgatgggggttctccagccatggagcaacattgcagccttcgagtggatctgctggacgtaaatgacaatgccccttacatcacagtgacctcagagcttggaaccctccccgagagtgcagaacctggcactgtggtggcacttatcagtgtgcaggatccagactcagggtcaaacggagatgtgagcctccgcattcctgaccacttgccatttgccctcaagtctgccttcaggaaccagttctccctggtgactgctggacccttggatcgagaggccaaatctagctatgacatcatggtcactgcttctgatgctgggaaccctcctctcagtacccacagaactattttcctcaatatttcagatgtgaatgataatccaccctctttctttcagaggtcacatgaggtgtttgttcctgagaacaatcgcccaggggacctgctttgctcccttgcagcctctgacccagactctggcttgaatgcgcttatctcctactcactcctggagcccaggaatcgagatgtatcagcttcctctttcatctctctgaacccccagacaggagctgttcatgctactcgatcctttgactatgagcaaacccagacactgcagtttgaggtgcaggcccgggatcggggcaacccaccccttagcagcactgtaacagttcgtctatttgtgctggacctcaatgacaatgctccagctgtgctccgtcctcgggcccggcctggttccttatgtccccaagcactgcctccatcagttggtgctggccacctaatcacaaaggtgactgctgtggacttggattcaggttacaatgcttgggtttcctatcagctcctggaggccccagatcccagcctgtttgcagtctctcgatatgctggggaggtgcggacggctgttcctatcccagctgacctcccaccacagaagctggtcattgtggtaaaggatagtggtagtccaccactctctacctctgttactctcttagtgtccttagaggaagacactcatccagttgtcccagatcttcgagaatcttcagctccaagggaaggagaatctcgtctaaccctctacttggctgtgtccctagtggcaatttgctttgtctcctttggctcattcgtggcactactctctaagtgtcttcgtggggcagcctgtggagtcacatgctttcctgctggcacctgtgcctgtctcaccagatctcgaaggagggaggggcttcccccttccaatgggatcctccgaatccagctagggtcagatgaccctatcaagtttgttgatgtgggaggccactctcatggctgtacacccttggcttctgcacccactcggagtgatagcttcatgatggtgaagtcacccagtgcacctatggcaggggagcctgttcgcccaagctgcccaccctctgatcttctctatgggctagaggtgagacctttgcaggctcaacaaatgcttgagggttattctgatccaggcatatggctaggccatgtcctagagagtactggcctctcagtaagtgcccatagtgatgtcaccatttttgtaagaggtaactatgtggtagacgctgtgctttgtaactgtttcgtgaattaaccagagttgtcacagtttagcattgggggcgggtcatgcctatatctgagtaagaaatgaaagtaattggtgatcaagagccaggctgttgtggaagcatgatgatggaatgtgggagcacaggaggctacagtgcacagggtacagtgcaccaggcagtcacttggacaaaggtggctgttttctctactcttcctgaaagaggggatcagattctgaagtaccttaactctaggttaccatttcccaagggattgaggggaaataaaatctttgtctcccagtatctagtacactgtgaagggacctctctatttgaaacatagagacagcagaaagaggagagaactaaaggaatagagaggcacgcatcagagtggtggcatagatcttttggtctgggtcttaggactcatatcaagtccctactggggatttgaactagatgcggtaaattggaaggttggggcgggttggtcatcacctttggaaaaaacagtaagtgaaatcacttatgtcagaaaactggtttacagttggctgattcatagaaacagccaccctgtgcatctttaagttgagttctcctgaatttggtgaaaccatgaaacctagaagccaagccatccatgcttggcctctgaccaccctcctgggtgacctgattcagccccagaaatgttcccctacccaaaaactgtaacactcattccacatttggggtctggggtgtcagaaaagctaagtcccatgtcagctgacattgagatttccgcaaagcattgctggagagtcagggcaagactttacaaggttcttactaatcttttctctcaccttagcagcattcagcaggatgggggagggtgggggaatacatgggctttgcctctcccagaaggacaagattttgctggttcaagcaaagtggtggaagcttctgaagtcatgcaggaagttgctgggacagaacgctgaggagttttgtatcactttgtcttccctgttgagtaccatctgagctgtcaaactttgctgccaagggggctgaatcaacctgcagcacgaagtgagtggggaggtaggaagcttctgtgacacagatttgcagcctgtgttcccaaggtttccaggattgaggaaactccataattggttgagagcacacagactttttggccaatcagactcagagctgaggtgggagatctgctcttccagcccgcctctcctcctccagctccccagctccactcaaattcagctcccctcccccctgcccacccccgccactcggtgactaagaactgctgcaagcaggcaaacctccgagcagtttttaagaggctggaaggagacataagagacttcagctgctgcattccaagccctgggtctaccttggagacaggacagcacagacttactctccacaaagggacttctgggtcatggggcccaagacactcccacagctcgctgggaaatggcaagtgctgtgcatgttgtccttgtgctgctggggctgggtgtctgggcagcttcgttactcagtggtggaggagtctgagccggggacgctggtggggaatgttgctcaggatctgggcttaaagatgacagatctgttgagccggcggctgcaattgggctctgaggagaatgggcgctatttttccctgagcttgatgagtggtgccctggcagtgaatcaaaagattgaccgagaaagcctatgtggagccagcaccagctgcctgctgccagtgcaggtggtgactgaacaccccctggagctaatccgtgtagaggtagagatcctggatctcaatgacaactctcctagctttgccacccctgagcgagagatgcgcatctcagaatcagcagcatctggggcacgattcccactggacagtgcccaggatccggatgtgggcaccaatactgtgagcttttacactctaagccccaacagccacttctctctgaatgtgaagaccctaaaagatgggaagccattcccagagctggtgctagagcagcagctggatcgtgaagcccaggcaagacatcagctggtgcttactgctgtggatggggggaccccagcccgctcagggaccacccttatctctgtcatcgtgctggacatcaatgataatgctccaaccttccaatcctcagttctacgtgtgggaatcccagagaatgcacccattggtactctgctgctccgcctcaatgccactgatccagacgagggcaccaacggccaactagactattcttttggagaccacacatctgaggcagtgcggaacctctttggcctagaccctagcagtggggcaatccatgtgttgggtcccatagactttgaggagtcacgtttctatgaaattcatgcaagagcccgtgaccagggacagcctgccatggagggccactgtgtgattcaagtggatgtgggggatgtcaatgacaatgccccagaggtgctattggcctctttggccaaccctgtcctagagagcacaccagtgggcacagtagtggggttgtttaatgtgcgagaccgggactcaggtagaaatggtgaagtgagccttgatatctctccggacctgccatttcagattaagccttctgagaaccactactcgctgctaaccagccagcctttggaccgggaggccacatcccactatatcatcgagctgctggccagcgatgctggttcaccttccctacacaaacatctcaccatcaggctcaacatttcagatgtcaatgacaatgcaccccgcttcaaccagcagctttacactgcttacatcctagaaaaccggcctccgggctcccttctttgcactgtggctgcctcagatccagacactggggataatgcccgcctcacctactccattgtaggaaatcaggttcagggagccccagcctcctcctttgtgtatgtcaacccagaggatggacggatctttgcccagcgtacctttgactatgaattgctgcagatgctgcagattgtggtgggggttcgagactccggctctcccccattgcatgccaacacatctctgcatgtgtttgtcctagacgagaatgataatgccccagctgtgctgcacccacggccagactgggaacactcagccccccagcgtctccctcgctctgctcctcctggctccttggtcaccaaggtgacagccgtggatgctgatgcaggccacaatgcgtggctctcctactcactgttgccacagtccacagccccaggactgttcctcgtgtctacacacactggtgaggtgcgcacagcccgggccttactggaggatgactctgacacccagcaggtggtggtcctggtgagggacaatggtgacccttcactctcctccacagccacagtgctgctggttctggaggatgaggaccctgaggaaatgcccaaatccagtgacttcctcatacaccctcctgagcgttcagaccttaccctttacctcattgtggctctagcgaccgtcagtctcttatccctagtcaccttcacctttctgtcagcgaagtgccttcagggaaacgcagacggggacgggggtggagggcagtgctgcaggcgccaggactcaccctccccggacttctataagcagtccagccccaacctgcaggtgagctcggacggcacgctcaagtacatggaggtgacgctgcggcccacagactcgcagagccactgctacaggacgtgcttttcaccggcctcggacggcagtgacttcacttttctaagacccctcagcgttcagcagcccacagctctggcgctggagcctgacgccatccggtcccgctctaatacgctgcgggagcggagccaggtgaggggctcggcgccgccccgggcgacccctgggggcggcactggagaagccgcccgtcctcataagggattgaacttgcatccactcctctccggccggcttggtcgctggctgcgctccacccgattctcgggatcattggaccgtttgcgcgaaaccagagtggccgattaagggatggggctccgagcaccgggggtggtggcgactgtgggcgaggggaggtgggaccgacccccacccctacactcaaaaaaggccggggcctccttcgagcttccggtgaatttcgggcgatttccgcgggtgtcgggggtcccgggaggaggcagtcacagatccacccctgcagccagcctcctaggcgccggctccggcacgcttcgccggtctgtagatttcctcttcgatttctccccagctcccagcatctgtgacttcactgttaccctccctatccccgcatcacccaaccgcacctgtctgcgggacttaggtgtgcgcgcggggctcatgcgtgtcctccctgctggccacccccacggcccacacaagttgcacgggctcgccacgccccgccaacacgtgcgcggacgcacgcacgcactcctcgcacgtgggcttacgcgaataccagctttcactgccactcgctcgcggccagattcacaggcctgttccggtccactcgcagctcccctctgccgctccctccgccgggctcaggagtactcgtagctgattgtgcgcgcctgagggtcccagatcgcggccgcccaggaccaggcgaggactccggagcctcctctcacctctcccacctgcgccccgggctgggccgggtcgcctggggggcggcctgagcgaggcgcggggccaggagcgctggagcgactgccgctctaagtgccgggcgggcaggactctacgatccttgggccagaggtccggatggtcccgggactccgtctcaagggtcggcgacccctcaacccagaagcctcgagcaggcggacaggcagagctgcccagtggccgaggcgcggcagggctccgcgttgggcgagtgagtgagcctctataggacagcaggactgggactccagtggcaccagcggccccttcctcccgcaggaagtgaaagcctcgagcgccctggctctcaacccccagagatacaggcttttggcgccgtcgtgatcacaatgtgcccagcgatctagggtcagagatttggaggtgaccaaactatctgacactctaacaagtcctgtctcctctggcagatggaaagctataggctctgccagatgccagggtgcccttatgtgtgaggaaactacaatagtaaaaaacacaagtttctccaactccaggagcttttattcaaaatatatcaatgcctaactctgctcctaggactgtattttgaaacacccccaggtgattttgatagctgattgagagaaacttactatataactcctttgagaacctcatctcatttgctcttcccaccattgctgttggctaggtactaacatgcctctcttataacagcttcacagaggtcaagtgacttgctcaagttcacagagcaagtaagagagattctaacccctgtctaactccagaatgtgtgcttttaatttcttggcacttggaactttaaaagcttgaggacaggagaggggagttgcctctgctgggattttgcttctgctgggatggggcaagggtggggttccttcccttttaggaccttacatgtggggaaagtcttctgtggctcctcatttctgagcagtccccgcagcgcaaacttggccagttatccttttggagattgagttcccccagctccgtttcctcctatcacaatcactgcatttccatgtagattctgctgtgtctaagaatacagtggctgagggctggccatccctgtgcccttctccatggcagccccagaatggtgctggtgactcccgatacacctggaatgctaggtttctgggttctgctcatatcactgccacctgtgagccttgagtgagccactggcagttccggagcttccttctccctggagtaatctgagatactcacactctctgcttctgggagcaagtatgagtattaattaccagcccaccccagaaccagtgaggaggtggctctaggagtgctccatgagagtgtgtgatgggataacacaccccctggaaagaccagaagggactcaggaatgaagtggctggccagagccccacaccttcagctaggtgggagatggctacacatcagccccttgggagccctggagacttagttggccctgcttggaggctgtgggagctggatccctccccgctgcatcccttccatttttctccgtctcagacagagcagccttgttctcttctccttagtcacagaccattgtctggcacggagttctaggggtgagaagtgtcccgggacttggatgccccgcaaaggcccaatctggcatgactcctaaattaataatgtatttagctgtgggaagagattcttgcaagccaagggcccagagaagatgtccctgtgaatgtgtcactgcacaacctggcaccaaaagggttaccaagaacagcagccatcttgctgcagaggatgctttgttcccagctgaggagttgaataaattcattctagggctggtagaattctcattgaaaagcctcctttgccactttagggggctttgtctgcacctcttcccccagttccacagaagatgccttcagtccttgaattttggctcaggagttctgactctgggggcagggaggaaggggccatttctttaggaaaggagtctcagcttgctcactgtggtcagatgaaatgtgatttatctcttggtttctggtacctcagacctctgagacctgaggtgtattttgtctttggagatgagtccacccctgccccctcttagtccgttttcttctctgtgcccactcccctccttctctcccggcccatccctaggggctcgggtgacattctaacttctcacgggtactcagcccctttccctctgttttctccacagcaagccccgcccaacacggactggcgtttctctcaggcccagagacccggcaccagcgggtaggtgactgattctccagcccaccctcttctctgcggcattttctcagggatgacgtgggaggagatgggggagggcccagcatttgctacagatggcttctccctcagtttgagatcccagggaggtcttggtgtgcggggggctggcacacagaccccggaaggaagaggcgactgccctgactgttcaggaagctcaattcacatgcttgccccttccctcctcgccacgaccggcaccttttcctatcccctgagggcactgtggaaccaaaggatggtcttaagctggtctctgggtgaaagcgaggctttctatgcccatgtactgcctaaccccctcccctgagttgagctgggctccattatgacctggggctcaggcagaaaagcatttgaccggaggaggcggtccgcactcagcgcctcctccagagcctccagagccgaggctgactgcagcctggggagagtggaggcagcacagctggaggtggaactgaggaaggactgggcggggcatggagcaggcccccttctccggcccctcctcccactgtcctctgcccctacttgtcctgctctctgtctgtggggtctccgtgtctctgcccctttttcttgagtttccgtctttgccactttctcttacctctcagtccttccctcagtctctatctcgctttgcaatctctgcctctccctctcttctccatctctgtcttagcttccgtcttgattgctgcacctcagcctcagtccctttcatttgtctacttgcattgatctgtgccgcccactgtgcctgccatggcataagtgctcaataaatgtggagtgagtaactacacgggacccttagtctctttctccttctctatctctgcctccctgtccttgtcctggacctcttttctgtttctcctttcaccgtttcctagcgccttgtgttcttctatccccagcctctatgtttctctgtctctcactatttctgctttcctctctgttctttgtctctctttgtctctgtctctgtatatctttctttgtctctgtctctggtctctgtgcctgttgtctttttctgcctctttctctgttactctttctttatctctctttttcttttatcttgtcttttttctctgagcctctgtctctgtctctcatttttttgtgcttgtgggcaagccagcacacacaaccccccacccaccacccaccaacaccccgctctcttccttccctgcccctcacacactgagcctttgatcgcagctctccaccagacaccctcccatccaagcagccccagctgctcatttcaatctggtatgaattcctgctgagacaggaaccccctgcgggctgaaggggagggaaacttcagcagaaagaccttcagttggtctgagcagagtgggataggctctgcgccaggcctcccagttagaagtcaggagcctggaggagtctcagagcccagggagagaagcaggagcttgggccaccttaccctacctcctcaatggttgagtacttgctgtccacatttgccaagttgctacagatgctgagcttccaagagttatctttcccccatcctgcaaccaaccaaacccttgttgccacaaggacccaggagcccttggtgtatggcagagattccagcttctgggcatgcacagtcctgtcacccattttaggaacgcaaagcgcttcttagaaggcccctaaaaagcagcagatcaaaaggcttgggctgcccttgcccttcctttgaccccagctgttgtccttctccctgctggccttgccaaccttctcataagttatccattaagtcattaatgtattcattcgttcatttattcaacaaatatttatcgagcatctactatgagcagggccctgtgctaaacattgggctataggagtgaacaagtagatgtgatcccagaactcataggcttccagaccagcagaggagactgaaaatttgcaacaagtaacacttaaaaaaaaaaaaaaaggctgggcactgtggttcacgcctgtaatcccagcactttgggaggccaaggtgggtagatcacttgaggtcaggggtttgagaccagcctggcagccaacatggtgaaaccccatctcgattaaaaatacaaaaattagccaggcgtggtggcaggcacctgtaatcccagcgacttaggaggctgaggcagaactgcttgaacccggaaggcagaggttgcagtgagctgagatcacgaaaaaaaaataatctagccacaaatcacagtaagttctgagaggcagagaacaatgtgagtgtaatgggggggggaagatcagagaaggcttctaggaggaggtgacattgagaagttctaggccatttatgttccctctacctaccaccaccccaggccatacactggctttgaagcagaattcaccattgaacctggaagccccaccaactgcctctcatgtgtcctctggggtgagcaccttacccctgcctcaactcccattccatcaaatgagaggcttagtggcctggaatacatgtgggagctcttggagatatggaggagaaggtgcggaacctctctctctctcctctctctgcttccttagttaacttgtggaggatgcaacaaaccttttttttttttttttttagacagagtcttgctctgttgcccaagctggagtgcagtggtgcgatcttggctcactgcaacctctgcctgccaggttcaagcgattctcctgcctcagcctcccgagtagctgggacagcaggtgtgcaccaccacacccagctcatttttgtatttttagtagagatgggtttcgccacgttggccaggctggtttcaaactccccgacctcaactgatccacctgcttcagcttcccaaagtgctagaattacaggtgtgatcgcccccggccacaacaaacatttttgattcagcggctccaaagtgaaataagcgttaggatctagtccagtaacttcaacttctctccttcattcattcaacaaatggtcagtgagcactttctgttggccaggcagtgttctcgatgtgggaggcccctgccctcaaggagtttacagtgcactgaaggagacaaatattgaccaaataattacaaaaataaatgtgagactgaaactgtcataagtgctaggtagaattgtatctggtggtgtgggcgtataatagggatttgatttagggagcaggaggacatcctggaaatgaagttgtgctgagatctgaaagacaaatacaaattaaccagctaaagaaaagaaggaagagcattccagatggtcaggcataccagcttcaaagcagggctggtgttgagttcttcagtaaacttggttcaagatcaagccagctctgggtcacactgcctacacagaaggaagagcattccaaatgggaaaagcctatgcaaaagccttgtggtgaggcctcctgggatcaagggaatggcagggagttttctctttgctggcactggagtgaggggatgaagaggagaggttccttttatccagtctaaccctggttccagccttctgttgatgccctgcctcactccctccccaccatcttgcccactgccctccagcctggtctggtcagacacaccagcttcaaagcagggctagtattgagttcttcagtaaacttggttcaagttcaagtcagcactgggtcacactgcctagacagaaggaagaagacctggccaggtgtggtggctcacgcctgtaatcccagcactttgggaggctgaggtgggtggatcacctgaggtcaggagtttgagaccagcctggccaacatgatgaaaccccatctctagtaaaaatacaaaatattagccaggtgtggtggtgcacacctgtagtcccagctactcaggaggctgaggcaggggaatcgcttgaacccaggaggcggaggttgcagtgagctgagatcacaccactgcactccagtctgggtgacagagcgagactccatcaggaaagaaagaaagaaaaagagagagagggagggagggagggaaggaaggaaggaaggaaggaaggaaggaaggaaggaaggaaggaaggaaggaagaaaagaaagaaaaagggagaaaaaatgaagaagacttacattctgaagttcctgcttggcacatgcttctcctccccaccactatcccttctcaggtcatcctttgggtgtctgatcccaatagctgttgtctcaagctctgagcccagcaaaccatttcccccttcttaggctgtaacccaggccctgccctgcagctgtccccagcctctgcacaaagagtctccatttggtccctagactgttctctgatggctccacactaccatccctcctctgagagacagtatccctgctctctctcagtttgggcagtcattcaacaaacaaatagcaacttaatttttttccacttataaaatagtacatgctcattatagaaacatgaaaaatagaaaaaaaattaaaaggaaaaccacccatcattttacaatctagggagaaccaccaccaactacagtttaatatgaaacatttcaaatatgtacaaaagtagagagaatggtgtcatgaacctgtatgataccactatccagcttcaactaatgccttatcttgtttcacctatatccctacccttatcctgtccttggattcttttgaagcaaatctcagacatcatataatttcatcttggtctccaccatctttaacagatgacttttttttttttttttttttttggagacagagtctcactctcttgcccaggctgtggcacaatctcagctcactgcagccttcgcctcccgggttcaagcaattctcatgcttcagcctcctaagtagctaggattacaggtgtgcaccaccacacacagctaatattttgtattttcagtacaaacagggtttcgccatgttggccaggctggtcttgaactcctggcctcaagtgatccaccctcctcggcctcccaaaatgttgggattacaggtgtgagccaccttgcccggccagatgattctttcataaggtccacattttatatttgagtgagtgtctcttaagtatcttaatgctcttttaatgtaaaagacttcccctccatcttccatttttgcaatttatttgttgaatccctgccttttcatatatatctttctaaacttttctttgtgtaatcaaagaacatgcatgagcttcatttttatttttatttatttatttatttatttatttatttatttatttattgatacgtagccttgctctgtcacccaggctggactgcagtggcgcaatctcggctcactgcaagctccgcctcccaggttcacgccatgctcctgcctcagcctccagaatagctgggactacaggcgcccactaccacgcccggctaattattttgtatttttagtagagacggggtttcaccgtgttagccaggatggtctcgatctcctgacctcgtgatccgcccgcctcggcctcccaaagtgctgggattacaggcgtgagccaccgcgcctggccgagcttcattttaaaaaaatctcattcacctaaataagttgttcacaaacttgtcacactttcatgtgacactttattcacatattaagaactgttattcccagtcatacggtacatttcctactagttttttaaaaatagcaactgaggccatactgtccaacagaattatagcttttttcttctttgcagtgtatcatgagaatttccccatgtctttcaaaattcttcccaagtcatttgcagagtaactcctcttatgaatatacatattattttacagaataagtcctcatatgaatatacatattatttttctaatgctaatgggcttttgctacattagaaaacatacacattcatttacaattttttttttttgagacagtctcgctctgtctccaggctggggtgcagtggcgccatctcggctcactgcaagctccacctcctgggttcaagcaattctcctgcctcagcctcctgagtagctgggactacaggcacgcgccaccacgcccagctaatttttgtatttttagtagagacggggtttcaccatgttgaccaggatggtctcaatctcttgacctcgtgatccgcctgcctcagcctccctaagtgctgggattacaggtgggagccaccatccccagcctcatttacattttaacacaattaaattcagggtgttgtcagggtgacttcctagatttctcagttttttgagcatgatgtagggagtattttattatagtccagtctatgggatattcccttatacacacacacacacacacacacacacacacacacacacacacaccccaaactcaatagggcaagaaccatattcatcatctcttaaatcctaggtcctgtcacaggccactgcttggaaaatagttgactaaatgtagtccatttcttccatttttacttttcactattccccaaatcctggaagagtccctcatatctgctgctggggctccaaggcctccaagctgaagcccagtacgttgttgtgcataagatcataggccctggaatcatattaggctggctttcaggttgcaactctaccagttccagctgtgtgactctggtatagtctctcaacctctctgagccctgttttcatctgttggaaaatatagataatcacaacacttatctgcagggtgattccgaggataaaaaagacaaatatattacccagtcagcttagaataggaagctctcagtaaatggttaaaaaagaggtctctctccctctgctcatctcttacccagcttcacataattggcagcccacccacctgtttggccctcaaccttcaaccatttcccaggacgcctccttacactcctgatcatcatggttccaaccccactgttccactcagctttgttccctcaacaccactgctccctgtgacaggtcatcctcctaacctctggcatctggtcccgttgtctccctgacaacccgcatgctctcctccctgcaacccccgccgcttgcctgctctccctactttattcccattagcccccttcacctggggctgagaacacctggccttgaccctgcaccctcagccaggcccacagagctcagtcgggccggaagtaaggaccccagatattcagttgaggaatttaacattaatacaataatatagaatccaccagcagattttcataaatgttctgtgtgttcttttatccttttttttaatccaggattttatcaaggagcatagattgcatttggttgtcacgtctttcctctcctttaatctggagccagctcccagtctttttatttttttaatgacatggatatttttaaagagtccaggccagttgtactttaaaatgtccccgaacctggatttgctggctattctctgatggttagattcagattacacaccttggtaggaatacttcccgcagcatcacactgggactcatctaacgtcggcctgtcccactatcagtgatgccgagtttgttcgtgtggtaaaaacagtgtcccagatctctccattataaaaatatatttttataaagatattttaaaatatttgtgaaaatataagtaatctgtggatgatactttgagataggcagcaacccttcatgcaattttagtattccctgatgatccttgcctgtatctgtttttacatcagtgattacaaagcggtgatgttctgtcattccttctacatgtatttgctggtattcttctgaaaattacctggatgatttcttcagatttaaattcactgtcttttccttggggaagcctggactggctgagctgcctaaccctgactctctgtcttttttttttttttgacagggagtctagctctgttgccaggctggagtgcagtggcaaccttcacctcctgggttcaagcgattctcctgcctcagcctcccaagtagctgggattacaggcgtgtgccaccatgcccggttaattttttttttttaatatctattttagttgagacagggtttcaccatgttggtcagaatggtctcgatctcctgacctcgtggtctgcccgcccctgcctctcttcataccctctggtagcccctgacacagcccatggcaagtatcacaattgcaattactctattgtgtaattatttaaaatcagcctctcagtgcccaccatgagcaccgtaaagatggacagtttctatcatactcacagccacaaccccagcacctggctctgtgtctggtacatagaaattgctcaagaaagaattgttggaggggcgcggtggctcacgcctgtaattccagcactttgggaagcggaggcaggtggatcatgaggtcaggagttcgaaaccaacctggccaatatggtgaaaccccatctctactaaaaatacaaaaattcgctgggcatggtggcatgtgtgcacttgtcgtcccagctgctcaagaggctgaggcaggagaatcacttgaacctgggaggcagaggttgcagtgagccgagatcgcgccactgtactccagcctgggtgacagagcgagactccagctcaaaaaaaaaaaaaaaagaaaaaagaaaagaaataattattgaatcaatggaaacagaattacaactcttcccacttttgggaaggagaattgagattcctgctttccccttcaaccctagctttatgtttgttgtgatggtatagaggtcacacatggcagccttgtgtctgttcttaggctgagttcatctacttagggacggggaatcccagattgggcaaaaccaaaagcagggacagaccttggaaaaattgtaaagcagttcttggttgtgctcacccaccatgacaaaatatgcacacacacaacgcaacacacacacagacattttcatgccttcaaggcctaccctacagcctttcccatggtgccaaacccttcttcttaccttacagtcacttaactgtctctgctggtctcttcccactcatttaggcaacaaatatttattgaaaaacttctctgagccagatggtgccaaacagttacctaaagggcagactgtgtgtgtgccagggctgtttcccgccaacactcccctgcaaattgaaataatttcatccttggaaattcaaaaaaatcatgaaaattgtcactgtgggaaaattccaagtagagctgaaccttctaagaagcagagagttcttcttatggtttagtatttttttaaattatgaatcatttcatgttttttcaacactcggagtttctaaaagtctcacttaggtccaagtgctaggctttgtgctaggtgcttcagtaggaagcaggtggagtcgctgcctcacagaagccagtgtggtggaggaacagacaggcactacaacagctgcagtgtgactagtgccatgtggggcagccgctgggatgggagtacagtggaggcacctgcccagtctgagtggatctcctctgatatattttattcgtgtcatcatggcaaatgttgggggactggcattctagggaacaccatctgcccaggattcacagcaagagggaacttgagggataggaaagtgcaccttggaaaaggtttgatgatagagtgtttgagggcggggggtgggggttcttgtaaaataggaggggcaggttcttctatggccgtggattttactctgagggcttaggaagccattgaattttagaaatttcttctccctgctccagggtctcttggggcctcctacatctccccctaggtacctcctaggtccccactttttctctagctctggaacattctcttccatttcccaccttcacagtcctctggagaaggtctgatctccctcactatgacaggaagccaggctctctcatggtgggtgggggaatgcactatgttcaatgcattggaccagcctggccaacatggtgaaaccccgtctgtactaaaaatacaaaaattagcctggcacagtggcaggtgcctgtcatcccagctacttgggagactgaggcaggagaatcgcttgaacccaggaggtggatgttgcaatgagccaagatcgcgccactgcactccagcctggatgacagagtaagaccctgtctaaaacaaaaagaaaaaagcatcggaggcagcaaagagctggtttgagggactgacttgtgggattctggcttctgaaggattgtagaagtgcctcctaccttgctgagagaaacaggtcttgggcatggggtagggttagggtactaggtttgggagccctgggagaggacaggaggggcatgagctgtgccggcctgggagtctgtgctcaccatcctactctctccccagctcccaaaatggcgatgacaccggcacctggcccaacaaccagtttgacacagagatgctgcaagccatgatcttggcgtccgccagtggtaagtggtgtcagtgtgtgtatggaagagtgggagacctggggttctggggtgcatctcacagccaccatgcccacggactggatgtcaaacctgtgtagtttctccagatctttcggcaggtctgaaaggacccacaattccaaacataaagcctggaattgtggctaaggaacagcagaggggttgggggtcctgggatgcctggaggagagcgaacaaggaaaagactcatggagggaatagtggttacaagtctagctctggaatgggacagtgtagctcaggtcctagctctgctactatccttgggacttggatcgacttgctcaatctctctaaacctcagtttcctcagcctagaaagtggggacagggaccccaaagggttgttgtagagattaaatgagatgataccacaaagcatagagttctgggcctggcgcttggaagccctcaagcaatgaaagtgggtgtagaaatccccagccgagagaacacctcctctttatgcgaggctcctcttttgctgcccctaactccagagtaggattctggttttcccataaggttgactaagggcttcctttgtaatagagattcggctagtggtggttgtccctgaagagtcactagggcccagagcaggagaagaagaatatcatttgtccttaagagcacagcctaagctgggcgtggtggctcacgcctgtaatcccagcactttgggaagctgaggcaggaggatcatgaggtcaggagttcgaaaccggcctggccaacatagtgaaaccctgtctctactaaaaatacaaaaattagctgggcatggtggtgcgtgcctgtagtcccagctacttgggaggctgaggcaggagaatcgcttgaacctgggaggtggctgtggtgagcagaaaatcgcaccactgcactccagcctgggcaacagtctcgctctgtctcaaaaaaaaaaaaaaaaaaaaagagcacaggctttagaggcaggccaatctggattcaaatcctggcacctggcaccaccacttagcaatgagtccttaggtaagttattaaaccccctcggtttcacttactattaatgggcacagtattaacggatctcattgtggtgttaccagggccaaatgcaagtccctcagcacaggattggcagagagtaagggcacaatatattattatctttgctgacccaaacccgttttttactgggtagaaagcagaattagaataatgcctattaataaagactagcttctggagcagcaaatcctgggcttataaggaggctggcagaggatcaaggcattgccctatatcatgaactgatagccctgccctccagcatgtctggaggactggtgggtagagaaccaggtgaaatcacaagaagcactgtcatcacacctgggcacatactaaacaaactttaggggcctcctgtcaatgaatcctctcaatagctctgcaaggcaggtctgatttctcacactcgacagatgagagaaccgagaaggcacttgccccagggtcctcagttttgagctgccaagctgaggttctaacctggctcaactcctaagtttatgctctttctactatagggaccatggctgcctttggatccagcctcggcttctctattacctgagcaggatgagaggctgtcctcttcctcgagctctgctttattcttccagatcagggttgccagataaaatacaggatgcccagttacagttgaatgtcagataaacagcaagtactatttcagcataagtcagtctcaaatgttgcatgagacataatgtactaaaaaaaaaaatgctcattgtttacctgaaattcaaatttaactgggagccctgtacttttatttactaaatctggcaactctaccccagatgtctgtgaggttaagtggggccaggcctacagctgacggaaggacagagagagaggtggcagggactgctggcctcctgaggcagagctgtcccaggtctggtggggctatgattccagagaggccagagactgagtatgaaagtggcaggcggctgggtctgaggagatgccaagttggcctcttgagggaaataaacaggtatatttagctgttgtggccttgcgccctgaggccaggaagcagctttttagcctaaatccagatgttaaaaacagaaatgaaatcagtatttatggccccaaaccctccaagcaagtcatgcagctcgttcccctgtcaaggcctcccacctttggcccacacagggcctgaccctcgtctaagcctgcgccctggggaacggaccctgggggtggaggtggtgggtcaggccctgctctcactttcacacccgcttcctagccctgaaaccagagaggttcctgaagtccagcccagccaggcctgtggggctgctgagaggggttaagtaagagggagagtaaaaaccgacacttgggaggaggcttttaaaataaacatctgcggggagggatgctctcaaggaggctgcggtttgcagctcagccagctgtgttccagctaatcagcctccttgggctactctggagttgctgccttggccctgggatggggtaggttaagaggacagagggaggtcagggagctgggggctgagtttccctgagtagaggctggcacaggagagaaggcatcacccccacctcgtccaggccagaagatgtccagcttcttgaggctctcctaagtctgcctctcctgggaccaagagaaaatcccggtccttgaccaaggtgggccttggggggagtggggtgtagagggaggggcactggagaactgactctacagaaagtcaaagctggcaatccaacttcttcccctcagatttatagatgggaaaacaggcttgagccacgcagagacttgaccaagctcacacagttccttagtggcagagcagagcaaatattctctttcttttacattctggatttccatatcttctctccctcctggtccagcccaacctcagggcaccccccacgaggtgggcgggggatggctttgtcacttgcacccactcggggtgctactcagagatcttgggtgcacataggacgtgggtgggccgagcttctagctactccgtcaggcccttcctgtcattctgtctctgcctcccttctccctgcttctccgtgttcctcctcattcttttctgtgtgcagggagactacaccccccaccccgctctttctctggcgcctctgaggtcccccctctagcccctaaatcactctggaatcctggctctttgaagccagatctgggcccccctcccctaccccttccattcccaggctgggaaaggctgaagaggctgacggctggaggggagggggcggggcggtggcggatctggcttccttttggagttaattagggaaaacagagaaatgtcagcggaatgaaagggctgggggtgggggccagctggggtaggagaggaggaagtgggcagctgctccctcccactcaacccctctcccccgcccccagaaagctctcagctccggggatttgcgacatgaaatgggggctgtagaaacctgagcgctggtgcgtgaagagaaaaaccgaggcgcatcccggctctcccctcccgtgtgccctcctcctcttatgccggcttgaaaatatttcctgtctctctatttctcaatccctggttgatgtcccaggattactcagcctctccggctttagtcactctcgctacccgctcccagggtccagggtggaggcagagggaggctgggagagaagctctactgccagctgggcctgggctggcctgggcatccctgaggttttaactgtctcctaaccacagaggatctcagggcctccagcagcgagccccaatgagtcaaactcttgtttcctcctctcccacccccgacccagtcagggcaggtgaggggtagaggtgatggcatgctggatgtgacggtgttgatgatgtattgcacaggatgaagcaccatctcatttagtcctcacagcagccttcacagtgcgtacaaatcagctggcaattccgagaggctgcattctaaacaagttcctgggtgatgctgagccagggccagagtgtggacttctctgggccccagtttcttcttctgtacagtgggacgttggactggaggtgctgtctgatgtcacctagctgtggcactctgagcctgtgcctaaagtgtccctgagatgtctagtccccgagatcatcatctcctcagcttcatagagccgagctcttctccatcttctctctacctcccattcactcagaacagggataaggtccaagctgctggtggtgatggtgactgactgtcccttccagcatgcgcttaggtacacttgggcctgaatgcccctctaacaaatgctaccgggtatggccttggtccttctaacacttggttccctcatctgtaaaatgagggtcataccacatagctggctgggctgttatgtagaggttaaaagtgattgtgcatgtgaagcatccagcagagtgcctggcacacagtaggtgctcaaatgctgttttgaaatacaaaaattagctgggctagtggtgtgcacctgtaatctcagctactcaggaggttgaggcaggagaatcacttgagcccaggaggcagaggttgcagtgagccgggatcgcgccactgcactccaggctgggcgacagagcaggactccatcttaaaaaaaaaaaaaaaaaaatgctgttttgaaatggaggcttggaagagcactcttcacccccaccccacacacttactaacggaactaccgaatctctactcgtgccaggccttgcttggcaaaggctaggggcatgtaaagccatggtttcatggctgctgccctccaggagcccatggtctagtgtgggagtcagaggctcccttgagaaagccagggcaaggaactgagagcccgtgtcacagccctgagagaaataccagcgaatgtgttttgagcacttacatctaccaggcactattttacgtacctgacatacattttcttatttagcattcactaaaaccagaagaggtggttaccattatcatccccattttgcagatgagaaaactgaagtggcataaggaggttaggtagacttgcccaggatcacagtgagtaaggaaaggagctaggaatcaaacctagactttctcactccagagcctcttaacctctaccctcaactcttgtgaagagagactaccttggtgacccctatattcccagtgctcagcgtggtcaaggcccagggtgctgtataggcattcattaactgctggggatataagacagtgactgttgaggaccctaagtttagctcccacctgatcttcctctgtctctgcagaagctgctgatgggagctccaccctgggagggggtgccggcaccatgggattgagcgcccgctacggaccccagttcaccctgcagcacgtgcccgactaccgccagaatgtctacatcccaggcagcaatgccacactgaccaacgcagctggcaagcgggatggcaaggccccagcaggtggcaatggcaacaagaagaagtcgggcaagaaggagaagaagtaacatggaggccaggccaagagccacagggcggcctctccccaaccagcccagcttctccttacctgcacccaggcctcagagtttcagggctaacccccagaatactggtaggggccaaggccatgctccccttgggaaacagaaacaagtgcccagtcagcacctaccccttcccccccagggggttgaatatgcaaaagcagttccgctgggaacccccatccaatcaactgctgtacccatgggggtagtggggttactgtagacaccaagaaccatttgccacaccccgtttagttacagctgaactcctccatcttccaaatcaatcaggcccatccatcccatgcctccctcctccccaccccactccaacagttcctctttcccgagtaaggtggttggggtgttgaagtaccaagtaacctacaagcctcctagttctgaaaagttggaagggcatcatgacctcttggcctctcctttgattctcaatcttcccccaaagcatggtttggtgccagccccttcacctccttccagagcccaagatcaatgctcaagttttggaggacatgatcaccatccccatggtactgatgcttgctggatttagggagggcattttgctaccaagcctcttcccaacgccctggggaccagtcttctgttttgtttttcattgtttgacgtttccactgcatgccttgacttcccccacctcctcctcaaacaagagactccactgcatgttccaagacagtatggggtggtaagataaggaagggaagtgtgtggatgtggatggtgggggcatggacaaagcttgacacatcaagttatcaaggccttggaggaggctctgtatgtcctcaggggactgacaacatcctccagattccagccataaaccaataactaggctggacccttcccactacataatagggctcagcccaggcagccagctttgggctgagctaacaggaccaatggattaaactggcatttcagtccaaggaagctcgaagcaggtttaggaccaggtccccttgagaggtcagaggggcctctgtgggtgctgggtactccagaggtgccactggtggaagggtcagcggagccccagcaggaagggtgggccagccaggccattcttagtccctgggttggggaggcagggagctagggcagggaccaaatgaacagaaagtctcagcccaggatggggcttcttcaacagggcccctgccctcctgaagcctcagtccttcaccttgccaggtgccgtttctcttccgtgaaggccactgcccaggtccccagtgcgccccctagtggccatagcctggttaaagttccccagtgcctccttgtgcatagaccttcttctcccacccccttctgcccctgggtccccggccatccagcggggctgccagagaaccccagacctgcccttacagtagtgtagcgccccctccctctttcggctggtgtagaatagccagtagtgtagtgcggtgtgcttttacgtgatggcgggtgggcagcgggcggcgggctccgcgcagccgtctgtccttgatctgcccgcggcggcccgtgttgtgttttgtgctgtgtccacgcgctaaggcgaccccctcccccgtactgacttctcctataagcgcttctcttcgcatagtcacgtagctcccaccccaccctcttcctgtgtctcacgcaagttttatactctaatatttatatggctttttttcttcgacaaaaaaataataaaacgtttcttctgaaaagctgaacgtttctgtataagcgatggaagctcctggcatgtgtgcatgaagtgatgagctgaggtgggtgctggaagaagggcggaatcgggaggccactttgtgtcattgcgcgtctagatgtttccgaattgcgtgtgtgtgtgtgactgtgcaatatggttgtgtatgcttgcaatgccgttgtgcctatgagacagtgtgcgattgtgtgcctatggatctgtgtaccgtgtgccattgtgtgatcggtccgctgtgggggtggggatctgagtgcggcgtgtcagtgtgcagtggagtgtgcagtctaagcttgcggctgtctccaggcagaagaggagaccccggcgcgggcgggggcgggttggcgccgggcaaacgccttgggtagaggggagaggacgtttcgttagttcccgccccttcctgactaaaattgcctacccgaagcgccccggagggcttcacgggaggagggtagactctcctttgcccccgcacccccacccccgctgcctaggggttttgggaaagccgcgggagtgggagggaatgcgggaggtgattcttccaaagccaagtctgcagctcgagcctcagtttccccatctggaattcgccttcccgctgacatctccgtagcgaagcctaagaaattggagggctcatcctcttcttgcgggggtcaaggggactgaaaggacgtgcaggaaatgagatccatcgcagactcagctcccctccctccttcctgtcggtgcttttccactcactcgcctgctctcccatctccccgccccctccgcctgcctcctcgaagcactgtgggattccgaggttgctgcagccagagaagctgcagaaaaacacggagctgggggtgaagggggacttaaaaggggaactacccggaaggacccaagaacacaaagacagagccactgcggttatctggctggtcagcaagggtatgcggcttcctccgcgctgcggaggctcccagagccaggtcacccattctgccagctcaagtctgttgtcatgggaaccaaaccttccaacttaagaatctgggggcgactttctagcgtgggaggaagggtggtgtgcacggttgctgagatggaagcagggttttgttactcagagccaggctgcggaggggcggggtgccgggcgcctgggttctattccaggcacagcagcagactggcagagcgcgtgagcagctgtggtttgtcccctaattggtatgtgtgcctataaagctctgaaccagaaaggcgtggcctccggggggacgggagggaggcggcaggcaacccatccccacacctcaggccatactgaggaggcagctgcccaggctccagggctatttaaaaggcttttatttccagttccagagcccgcccgaatgggtttgtggtcctctccaggcctctccctgtctatcctgggcctgctcattgctggtctggcttttttgtgcaggtcataacg

SEQ ID NO: 445 - DNA, 160780 bp, Homo sapiens
  source 1..160780: mol_type = genomic DNA
ttgtttctttagtgtagatttctgaggaattagttaaatctataaacatgttgagatttttttaatgcatactgtcaaatttatttccaaacatcttatttcacctctcaatcatccgcagtttgtgcggtctttgaggattgtgaaaaacacgtttaatctactctctcaaagtctgagggtttttaaattctgtatagctaatgcccttttgtatgagtcatttctactgctaattgttaagtgaggaataagcttaagaactgatgtactgctttatctcaaattttcacagattagtaaattactgtaagtattcataagaaagaaagcgatggcacatgcaatgataatccatgttcggctaccaaaacatttccttttactggctatttctaaaatgagagctaaagtaaagttagaaattgtaaaataatactgaatgtgtcatgtgaaaaaatcactaaactattatctgcactttatagttattcagtctaacttttctttttatttcttttttatttttaagatcagagttatttacccattgttttaggctttgcatttgaactggtcattcatgaaacattgaaaggtttcataaaaattactactctatgaaaggtattgttctaaagattgagaacacattgtgaacaagatagtcatatgcatagcttgtggccaagaatctactgtacacaaaattaaggagcaaattctcttcccaaacctattatcctatttgtcaatctcatttgtacagggtaaggctaactcttgaacagtaggtgagttttttgcaagggaattgaagcattgccccaggttctagagggtcaactcctgtgaggaaacttgttactgcataaattgggactaaagccagacctccaagttcctgtcccactgtcttttcacttatctgtctcatccatttttcaagtccacctttgtctttaggagagataattatgtccctcacacaatacgctatactgagaatgggctgtggggatgaacaatgtgaaaactgaaaagaggaagaacacatcttaggaaaaaaatcgtcatattttctctaagaaaataaataacttcataaagtttattgtacaggaagacttggatcattcttgaattttcattgcaaatcaaaaacaggaatttgactttattatcttgggagaaataggaatagaaaagtgtataaaaaataaactttttttaaccaagaataaattgcagtaacaggttaagactctgggtgtcgctgttcaccaatcagggggaaaagacaaaccagaaatttaatcagaatcacaagatttctgcagcacaaagcactggctctggagctttatgaaagcttcaagcggaagccctgagagctctggctgtgaatgcactttattttggacccagaagatcctggggctcctcaggcctcgacagagggaaaaccgaagcacaggcgactccgcggcggggttgtaatggcggcgcctcctgctcgcccagaccacacccggctgctccagatctgccttctcctgggggttctggtggaaatcagggccgaacagattctctactcggtgtttgaggagcaggaagaaggctcagtggtgggcaacatcgccaaggacctggggttggcgccccgggagctggcggagcgcggagtccgcatcgtctccagaggtaggacgcagcttttcgccctgaacccgcgcagcggcaccttggtcaccgcgggtaggatagacagggaggagctctgcgacagatctccaaactgtgtgacaaacctggagattcttctagaagatacagtgaagattttgcgggtagaggtggaaataatcgatgttaatgataacccacccagttttgggacagaacagagggaaataaaagttgctgaaaatgaaaatcctggggcaagatttcctcttcctgaagcttttgatccggatgtaggtgtaaactccctgcagggttaccagctcaactcaaacggttacttttccctggacgtgcaaagtggggccgatgggattaagtacccagagctggtgctggaacgcgctctagatcgcgaggaagaggcggttcaccacctcgttctcacggccttcgatggaggtgacccggttcgctctggcactgccaggattctcataatacttgtggataccaacgataatgctcccgtgttcactcagcccgagtaccacgtaagtgttcgtgagaacgttcctgtaggcactcggctactcaccgtaaaagccactgatccagatgaaggagccaatggagacgtgacgtattctttccggaaagtaagagacaaaatatcacagctatttcagttgaattctctgagtggggatataacaatattggggggtctagattatgaggactctggattctatgacatagatgtagaagcccatgatgggcctggtctccgagctagaagcaaggtactggtgacagttctggatgaaaatgacaacgcaccagaagtcacagttacatctctcaccagctcagtccaggaatcttcttccccgggtacagtaattgcacttttcaacgtgcatgacagtgactcaggaggaaatggcctagtcacatgttctattccagataatctgccattcacacttgaaaagacctatggaaattattatcggttgttgacacacagaacactggacagggaagaagtctcagaatataacatcactgtaactgccactgaccagggaactcctccactgtctacagaaactcatatttcactgcaagtgatggacatcaatgacaacccacccactttccctcatgcttcctactctgcttacattcctgaaaacaaccccagaggagcctccatcttatctatgactgctcaagaccctgacagtggtgacaatgcccgaatcacttactccctggccgaagacaccttccagggtgcacctctgtcctcctatgtctccatcaactccaatacagggatcctatatgctctttgctccttcgactatgagcagtttagagacctgcagctgctgatgacagccagtgacagtggagaccctccactcagcagcaatgtgtcactgagcctctttgtgctggaccagaacgacaatgtccctgagatcctgtaccccaccttccctactgatggctccactggtgtggagctggcaccccgctccgcagattccggctacctggtgaccaaagtggtggcagtggacagagactcaggtcagaatgcctggctgtcctacagcctactcaagtccagcgagccgggactatttgcagtggggctgcacacaggcgaggtgcgcaccgcacgggccctgctggacagagacgcgctcaagcagaggcttgtagtggtcgtccaggaccatggccagccccctctctcggccaccgtcacactcactgtggctgtggccgacagcatcccagatgtcctggctgacttgggcagcctcaagccttcagcagacccagacgactcgggcctcacactctatctcgtggtggcagtggccgctgtctcctgcgtcttcctggcttttgtcacggtgctgctagcactcaagctgagacgctggcacaagtcacgcctgcttcacgctgaaggcagcaggttggcaggtgtgcctgcctcgcactttgtgggcgtggacggggttcgggctttcctgcagacctattcccacgaggtctccctcaccgcggactcgcggaagagtcacctgatcttctcccaacccagctatgcagacacgctcatcagccgggagagttgtgagaaaagcgagcctcttctgataactcaggatttacttgaaacaaaaggagaccctaatcttcaggtgagtcaatcttataatagatcataccacactgaaatatagacaaagagttgtgtaaatgtctctcattttatatgtaatatatcaaataaagttgcctcttttaatattttattgctttaaagaaaactggtggatgaccttccaataatgatcaacagtatttaccacacaaaaatgttgtttattacttatcctttttggtcttcattcagttgtagtttcagccagaattttctaattttacaactctgagccacctcatttccttaaatttccttttctgtgctgggtgtggtggctcacacctgtaatcctaacactttgggagtgtgaggaggacggattgcctgagctcaggagttcgagaccagtctgggcaacatggtgaaacccagtctctactaaaatacaaaaagttagctaggcgtggtggtgtgtgcccgtagtcccagctaccctggaggctgaggcatgagaattgcttgaacctgggaggcagaggttgcaatgagctgagatcatgacactgtactccagcctgggcaacagagcaagcctctgtctccaaaaagtaaaataaaataaagtaaaataaagaataaatttccttttctcttaggtgttcctgaaaagatacaagagacctgtaaaatagaaggcaattgtgtaaattcacatttacaatattctttctcatgaagctattgttggatctggactgagggttttttaatttcctattttcacactctaccatgctttgcttgaagtttacttttccttccttgaaagggtattttccattataacaggcaacgtcaatttaagaatactggcaatttgtgagtttaacttttagatataactttaacaggatattttctcaatgaactggtatatttcaaatattttcttgttgctgttctgagatgcaccagaagtgactatgtgtgattcctctggtgcactcctgtgattatgagaaatatttccaagctaatttcagtcatatataagtagattctaggagtaactttaataatttttaaattgcttatcatgacatcactattgagactttcttgatttccaaggaaaatataagtttttggagtcttttctcttgtcatcatgtgagcctctttcaaaggttgagttacttgggttctggactgatatgatttacgctgcttagtaaggtggcctcatccctattgctacaaattgctttcagatatttctgtcatcatgtggctctgggattattttatatgagggaaaatattttgtgtgtaggggatatacaacacttttgttctttgtgctttcatttaggttctgtgagaattcaaaattcatgaatgcatatgcttacacaaattagtgtaatttgataactggaagttgtagtgatagactgtggaatatgcctcaatttgacttacaaaggagagttttagtttctacatggttttgtattcatagaaagttgtggtgcaatacatagagtaagctggaatatgatatgatgcagttacctggcttggggagcagaaagcagaaataacaagtgaatgttgagagacaacttacatctgaggagagattgtttaaagtaattaagccataaaatataatttggaaatgctcaattggtctgaaactgtgtcaagcatattcaggtgttggcattaggaatatattccagaatgagagtgccacatgttttaaaggcctaggaaagcagtagataatttataacctaaaatcaaattttttaaaaaatgtgtttttgttagaatgggcagtgggtttcttttagcaaataacaattttgattaaacaaattgttgtatattcatattacggactactagataactatattatgggccactagataactataagaaataaataggaaagctctctatgtactgatatgatctttaagatataacaactaaaaaagcaatgtgcagaatatggtatgttgtatgcttacatttgtgtaaagaaggagacagaatatttataaaaatccgttgccctatacaagacatatctccggaaggatacctaagaaactttaacactcatttcccctgtgaaagcatttctcctcatctaaagcagagatgaaaggaagaacctatgctgaatgcatcttttgaatttggaactatatgaatatttcacatattttaaaacaaatgaagactttataaattaaaaaagaaaagaaaagaaaaaagttcttagcaaatattgacaagccattagtgcagtttcctgagaaaacctctgagcgtcgctgttggtcaaaagaacgaagagaagcgtttgggagcctcttagaggggaacttcctgcacaaaccaaccacacagagaaggccagtatagattcggaaacagaaaacaaaagcaggaaaagtgaccttagcccggattctgccatccccggaaggcttattcctcctatgggcaaaggagcaaagggagccagaagatgaaagcgagctcagggaggtgcgggctggtgcggtggctgcaggtactgttgcccttcctgttgtctttgttccccggggctctcccagtccagatccgctattcaattccagaggagctggccaaaaactcggtcgtaggaaacctcgccaaggatctggggctcagcgtccgggacttgccagcccggaagctgcgggttagcgcggagaaggaatatttcacagtaaacccagaaagcggagacttacttgtgagtgacagaatagaccgagaacagatatgcgggaagcagcctctgtgtgttctggatttcgatactgtcgctgaaaatccactaaatattttctacatagcagtaattgtgcaggatataaatgataataccccgctattcaaacagactaagattaatttaaaaattggcgaatccactaagccaggtacaacatttccacttgacccagccctggattcagatgttggtcctaactcactacaaagataccaccttaatgacaacgagtactttgatctcgctgagaaacagactccagatggtcgtaaatatcctgagttgattctaaaacactctctggacagagaagagcacagtttacatcaattggtcctcacagctgtggatggcggagacccacctcaaagtggcacgacccaaatccgaatcaaagtcacggatgccaacgataaccctccagtgttcagccaggacgtgtacagggtcaccctgagggaggacgtgccgccgggcttctttgtgcttcaagtgacagccaccgaccgggatgaaggcataaacgcagagatcacctactcctttcataatgtggacgaacaagtgaaacactttttcaacttaaatgaaaaaacaggagaaatcacgacaaaggatgatttggattttgagattgcaagtagttacactctgagtatcgaagcaaaagatcctggagatctagcagcccactgcagtatccaagttgaaattcttgatgacaacgattgtgcacctgaagttattgtgacttcagtatctactcccctaccggaggattcgccaccaggaacagtgatcgccttgataaaaacgagagacagagactctggagaaaatggagaagtttactgccaagtgttgggaaatgccaagtttattttgaaatcttcctcaaagaactattacaaactagtgacagacggcgctctggaccgggaggagatcccagaatacaatctcaccatcacagccaccgacgggggcaagccgcccctctcctccagcataattgtcaccctgcacatctccgacgtcaacgataatgccccagttttccaacagacttcctacatggttcacgtggcagagaacaatcctcctggcgcctctatcgctcaaatcagtgcctctgaccctgacttgggccccagtggccaagtttcctactccatcgtagcgagcgacctgaagccgcgggagattttatcctacgtgtccgtgagcgcgcagagcggggtggtgttcgcgcagcgcgccttcgatcatgagcagctgcgcgccttcgagctcacactgcaggcccgcgaccagggctcgcccgcgctcagcgccaacgtgagcctgcgcgtgttagtgggcgacctcaatgacaatgcgccacgggtgctgtaccccgcgctggggcctgatggctccgccctcttcgatatggtgccacgcgccgcagagcccggctacctggtgaccaaggtggtggcggtggacgcagactcaggacacaacgcttggctgtcctaccacgtgctgcaggccagcgagcccgggctcttcagcctggggttgcgcacgggtgaggtgcgcacagcgcgtgccttgggcgacagggacgcggcccgccagcgcctgctggtcgctgtgcgtgatggaggacagccgccactctccgctacggccacgctgcacctaatcttcgcggatagcctgcaagaggtattgccagacctcagcgaccgccgggagccctctgacccccaggcaaaactgcagttttacctggttgtggccttggccttgatctcagtgctcttcttcctcgcggtgattctggcaatctccctgcgcctgcgactctcttccaggtcagatgcttgggactgttttcagcctggtctcagctccaagcctggacctggggttctccccaattacagtgagggtacattgccctattcctacaacctgtgtgttgcctcacaatcagccaagacagagttcaattttctgaacataaccccggaattggttcccgcgcaagatctcgtctgtgacaatgcctcttgggaacaaaatacaaatcatggagccgctggggtcccttttgcctcagatactattttgaaggtgagctttaattaatttattttcacttctggttttattgtttcacctaatttgggtaggaagttccactgcgtatttctttgtctgtgagttagatttggccaatgttgtgccttaattgtcttaatcttatctaactgaattttaagtgttttctctctgaagtgtgagatttatttacccatgattgcaaacctttatcacatgagatattgcactgtatttctttttcttcctcatctttacattacttctctctgcagatttgttgctattgagactttaggcaattagtttcaccttcaggctctttgttattcaaattttagttttacttcctcttagaatcataatacttcagagtaaagagagtcttcattttagtaggctttggaaattgggaaacaaagaagaaagacttttgcataatggcatggcttgttaatcacagggcatgggtaggacattgtcccattgacttgaagaccaacactcagtaagctaaatgtcttggaatcacaaatgtatttctaaaggacaggcaatgtttgaggtctgaggtgtctgctagaaagagtgcatttaacaaatgtgagaaatcattctctaacatgcattttaacaaattgctcttaagaaaaactacacattgagaaaaatcttacaacctatgttcacatcattttctacaaaatattacttaaaactttgcttttgaatttcctaattatatagaatttttattttcttagttttctatgaaagtgttattaaataaaatgactttctgaaatgtccatttttttcaatcaagaggtttttctatttctgttgtcatataaagatgatagcagtaaatatctgtctcaacatagaaaggtcactcagtacttctcgacaagtatctgctcatgctttcctgcatggatgatgaaataaaaccccatcctccacagttactatactggttgtcactggaactacaaatatttgaacatggtaatagaaaaacataaaaatgcatagttaacccaactcaaacgctgtctgagatagtggagagactttctcaaagtcctcacaagtaacaaagatctttatttcttctgcatatgacagctaatataacttacataaatcagtaggcctgtttggaaaggtgcatggagaactgggtttgtttccttggtattcttatatgcaaataagcacgttttcctaaatttatcctaataaggagatgaaatcttgaatcctacaaaggtaagaatttgaatgtcctaatttaatggactaaatatagataagaggtaaataaaggacataggctcccccgatgacgcattaaataaaatttttgtaaggtattgagatctaataatcatattgatctcagggattgtggaagtcttgctattcagaattaaagctgaattaacggtcataaacaacgctacacagttaaacattaaggatatggcaacattattagaaataaaattataactaaacttaggagaaataaaaatggaatttgatgcagtcactggttaggactctgagtgtcgctgttgaccaaagtgggaaagaagctgccgcagaggcgacccgactctgctccctccatactaaacacacagaccagacaagctcctacgaaaagccaacgctccacgcccattttcgtcagggaatatgtacccatcggctttagataaataaggaaacagcaggctgaaccagaactaagagaaaattgggcagagagaaggcaatggcgagtccacctaggggctggggctgcggagagctgctgctgcccttcatgctcctggggacgctgtgcgagccaggatccgggcagatccgctactcgatgccggaggagctggacaaaggctccttcgtcggcaacatagccaaggaccttgggctggagccccaggagctggcggagcgcggagtccgcatcgtctccagaggtaggacgcagctttttgccctgaacccgcgaagcggcagcttggtcaccgcgggcaggatagaccgggaggagctctgcgctcagagcccactgtgtgtggtgaactttaacatcttggttgagaacaaaatgaaaatttatggagtagaagtagaaataatcgatattaatgataacttcccgcgtttccgggatgaagagttaaaagtaaaagttaatgaaaatgcggctgcagggacacggttagtgcttcccttcgcgcgggatgcggatgtgggtgtgaactctctccggagttaccagctcagctccaatctgcacttctctctggatgtggtaagcggaactgatggacaaaagtatccggagctggtgttggaacagcccctagaccgcgagaaagagactgttcacgacctcctcctcacagctttagatggcggagacccggtactctccggcaccacgcacatccgtgttacggtcctcgacgcaaacgacaatgcgcccctgttcaccccatccgagtacagcgtgagtgttccagagaacatacctgtgggcactcggctgctcatgctaaccgccacggatccagatgagggaataaacgggaaattgacctactcttttcgcaatgaagaagaaaaaatttcggagactttccaacttgattccaacctgggggaaatctcaactctacaatcactggactatgaagaatccagattctacctcatggaagtggtagctcaggatggaggcgctcttgttgccagcgctaaggtggtggtcacagtacaggacgtgaatgacaatgcccccgaagtgatcctcacctctctgaccagttcgatctctgaagactgtcttcccggaactgtaatcgcgctgtttagcgtacatgatggtgattctggagaaaatggtgagattgcatgctctattcctaggaatttgccttttaaattggagaagtcagttgataattactatcacctattaacaactagggacctggacagagaagagacttcagattataatatcactttaaccgtcatggaccatggaaccccgcccctctctacagaaagccacatccccttgaaagtagcagacgttaatgacaacccacccaatttccctcaagcctcctactccacctctgtcacagaaaacaatcccagaggtgtctctatcttctctgtgacagcccatgaccccgacagcggcgacaacgctcgagtcacctactccctggctgaagacacatttcagggggcgcccttgtcctcctatgtatccattaactctgacaccggtgtcctgtatgctctgagatccttcgactatgagcagttgagagacctacagttgtgggtgacagccagcgacagtgggaaccctccacttagcagcaacgtgtcgctgagcctgtttgtgctggaccagaacgacaatacgcctgagatcctgtaccccgccctccccacagacggttccacgggcgtggagctggcgcctcgctccgcagaacctggctacctggtgaccaaggtggtagcggtggacaaagattcaggccagaacgcctggctgtcctaccgcctgcttaaggccagcgagccaggactctttgcggttgggctgcacacgggcgaggtgcgcacagcgcgagccctgctggacagagacgcgctcaagcagagcctcgtggtggccgtcgaagaccatggccagccccctctgtcagccaccttcacggtcaccgttgccgtggccgacaggatccctgacatcctggctgacctaggcagtatcaagacccccattgaccctgaggatctggacctcacactctatcttgtggtggcagtggctgcagtctcctgcgtcttcctggccttcgtcatcgtgctgctggtgctcagactgaggcgctggcacaagtcacgcctgcttcaggctgaaggcagcaggttggcgggtgtgcccgcctcgcactttgtgggcgtggatggggttcgggctttcctgcagacctattcccacgaggtctccctcaccgcggactcgaggaagagtcacctgatctttccccagcccaactacgcagacacgctccttagtgaagagagctgtgagaaaagcgagcctcttctgatgtctgataaggtagatgcaaacaaagaagaacggcgagttcaggttagttttctctttcggtaaggatgaccagaacattttcatttgtttcctttttcatgtttctgtcatattcagaatcagctagttatgtaaatagtggaacattatttgctgtattggagattaattttttttatataattcatgctttctccatttgttttcaaattctgttttgggaagtctagctgatatctgtagacttaagtgaaacaaataccttaaaggaaagtggttaaatataatcattttacccaaatattttgttatattggaactgcagttctattaatagaaaagatgttttatttattcaaattgttagatatattgttctcttttgagtgtctgcctagacaccattagtgaatgtgttttggaaaggataatgtataggactgatattttagtctacctgaaatttgtttaaggaaataatttacagtatttacataaatcagtggaaaggtacagagaacttctgggtcataaatatcagaaaagaggccgggtgcggtggctgacgcctgtaatcccagcactttgggaggctgaggtgggcggatcacgaggtcaggagatcgagaccatcctggctaacacggtgaaaccctgttctactaaaaatacaaaaaattagccgggcgtggtggcaggcgcctgtagtcccagctactcggaaggctgaggcaggagaatggggtgaacccgggaggaggagcttgcagtaagccgagatcgcgccactgcactccagcctgggagacagaacgagactccgtctcaaaataaataaataaataaataaataaataaataaatatcagaaaagtagataaaatttatattaatgataacatgtagcattctaaagtctggaaagtttgtgttaagccatgtagttattggatatgtgggcttgttgagagaagaaatcagtgtaaaggaaccttaaggttgggcttcgttctgtgatgtaaagcctccagagagttacatactgctgcactcaataaatgtaaatatgtcacacacctggcatcttctgttatagataaaccctttacttattagaatcaatacctactgcaatgttagcgtttctttaagtgtaggtgcaattcttctttattacttgagtttaaggttgtatttgaaaaaaaaagaactcaacttaaagatggttcaaaattttaaatttcatatctaacgtatgtgctcatcttaaattaatagatttgtcttaatgaaatactggcctatgtgcctcaaattccaggaggatgtgttatgtaatgaaagaactactatatttcccttctgcatctgatttgctgaagatgattttcagatgtttcttattaaaatattcttaatccttcaaattttgtacttttaaaaccttgagcatcagcttcaaataatgactaaataaggggaaaaggtaataaaatattacaaatgggatagtaagctacattactcaaccacatgaaaggttaattgacacattaaagaacctaagaccacttgatttttattttttaaacactgttaaagagcattcaagtatatctatatctatatacatatacacacacatatatatacacacatatatatacacacatacacacacacaaacacacatacatacacacatggacattctgaccaaaatgtaaaatgtacaaactcaccgaatagtgaatgcatccaaagagtaacaagagaatctatacagtaggtgtcgacattattcactcctatgtgaaaacttgcttttccattttttttaaaagaaaatgttatatgcttcttagggtaaggtgtttgggaaaaaagtaaaggttatagatttgggtacatttcttctgagttaaatgttttgtgcaatggaaaaatatctttaaaccctctataaactactaacagactataaaatgcttgatccatacattttgaatgtatgtactgtatataccatatacttttaaatatctgaatctttagttttatatgtgttctgaagaataatttttcatactaattgaagtgttcatacaatgaacacttggcattgtgttggaaggcacttgctttggaatgttttggagcaaagtcttgagtcagttatatttttgatgtttgtataaaggtgacaatgagtgtctgtctagaattctggttactgtgagtagtttaagatgctataatgcttttccactataaggtgaattcggtgtggaactcattgcttattgctgcacacttgcctagttttagagtaacaatacattatgtaggctaaagataatttctttaggaagattttctggtttgaaaatggaattaaaactgtaagacacctgtcagaaacatggaaaatggcatgttattgaccagggaaaagtgtaaataacaaaaagttaggattatcagatggtaaactggggaccaaggaaaagtggacaggaagattacttatataattaaataatataattataaggacttacaattcactccccaatcctaataacgcatcattgttaggctacttgagaagaaacagtacatttcaggacaattgtgatgtagtatgaaaaaacatcctttgtaaaagtttttcatttgggccagggtggttcatgactataatcccagcaatttgggacgctgaggtgggaggattgcttaaagccaggtgttctagcccagcctgggcaacatagtgaaaccccacctctatagaaaaaaaaagttttcaatcatacttatttaattaaaagtagacacttggaaacaaaggaaaagagaccctcttgctttttactatacttctattttataaggtcaatcatttcctcattacctttaacttcttttggggggagataataaagataaaagagaagaaagtgaaacatagaataaaactaaaagctatgacattataacttttagaagttagaagtaaaggaaatagaatgcaataagaatacacgtgaagctgatatttcaagcctctttatactacgtcttctgccatcaccaaaaatagcttccatttgtatgattttctatgtattattttatttggccctcatttctactagagtaagcagagaagatattattatgaccattttatgaaaatggaaactaaaaacgtgacgggattgagcaagattatctctgccctttgacaagtaaaaggtacttgatttggatggataaagctcaaattaaaagaaataacagactaaagatatagtaagtatatttaatgttttttaaaagtccttttaaaatgggaagaaagtatcactatcagtacactgccgatttttctcctaactagctccttatttggagctgatttagtcaccattactgcagttctgcagcagaggcgccgggtgccgctcttggctagtgctgtgcaaaatattggctcctcccgctgcagccagctcggaagaaaagtgcactctctatcaggcttcctgcagcggagacacccattagagaacccaagcacaaagacaaagcaaatagttggtcctgctcggagaactcttgggattatttaaagatctcctctcctcggatttagaaaggcaaaggcgcagagagcgggatgggaaatagctccggatggaggggcccagcagggcagaggcgaatgctatttctcttcctgctctctttgttagaccaggttctctccgaaccgatccgctacgctattcccgaggagctggacaggggctcgctggtagggaacctcgccaaggacctggggtttggcgtgggggatttacctactaggaacctgcgggttattgcagagaagaaattctttaccgtgagccccgaaaatgggaacttacttgtgagcgaccgtatagaccgagaggagatttgtggcaagaagtcgacgtgtgttctggaatttgaaatggttgctgaaaagcctttaaacttttttcatgtaactgtgctgatccaggatattaacgacaacccaccgacctttagccaaaatatcactgagctggaaatcagcgaactggctctcactggagccacatttgccctggaatctgcgcaagatcctgatgtaggtgtcaattcgctgcagcagtactacctcagccctgatccgcacttctctttgattcagaaggagaacctggatggcagtaggtacccagagctagtactgaaagcacccctggacagggaagagcagccacatcaccacctggtcctcacagctgtggatgggggcgagccctccagaagctgtaccacccagatcagggtaattgtcgcagatgcaaatgataaccccccagtatttactcaggacatgtacagggtcaatgttgcagagaacctgcccgctggctcctccgtattaaaagtgatggccattgacatggatgagggcatcaatgccgaaatcatctatgccttcatcaatattggcaaggaagtgagacaactgttcaagctggacagtaaaacgggggaactcaccactattggagaactggactttgaagagagagatagctacacaattggggtggaagcaaaggatggtggacatcacactgcatattgtaaagtacagatagatatttcagatgaaaatgacaatgccccggagataaccctggcttctgaatcccaacatatacaagaagatgctgagctggggactgccgttgccctgatcaaaacacatgatctagattctggatttaatggagaaatcctatgccaactaaaaggaaacttcccctttaaaatcgttcaagataccaaaaacacatacaggttggtgacagatggagccctggaccgggagcagatcccagaatacaatgtgacgatcacagctaccgacaaaggcaatccaccgctctcctccagcaagaccatcactctgcacatccttgatgtcaacgacaacgttcccgttttccaccaggcctcctacaccgtgcatgtagctgagaacaatccgcctggagcctccattgcgcatgtcagagcctcggatcccgacttgggacctaatggccttgtctcctactacatcgtggccagtgacctggagccgcgggagctgtcgtcctacgtgtccgtgagcgcgcggagcggggtggtgttcgcgcagcgagccttcgaccacgagcagctgcgtgccttcgagctcactctgcaggcccgcgaccagggctcgcctacgctcagcgccaacgtgagcctgcgcgtgttggtggacgaccgcaacgacaatgcaccgctggtgctgtacccagctctggggcccgaaggctctgcgctcttcgatatggtgccgcgctctgcagagcctggctacctggtgaccaaggtggtggcggtggacgcagactcgggatacaacgcctggctgtcctaccacattgtgcaggccagcgagcccgggctgttcagcctgggcctgcgcacgggtgaggtgcgcacggcgcgtaccttgggcgacagggaggccgcccgccagcgcctgctggtcactgtgcgtgatggaggacagcagcctctttcagccaccgtcatgctgcacctaatcttcgcagatagcttgcaagagatacaacctgaccttagcgaccgccccactccctctgaccctcaggcggagctacagtttcacctagtagtggcgttggccttgatctcagtgctcttcctcctcgcggtgattctggcaatctccctgcgcctgcgatgctcctccagacccgccactgagggctactttcagcctggtgtctgcttcaagactgtacctggagttctccccacctacagcgaaaggactttgccttattcctacaatccgtgtgctgcctcacattcctcaaacaccgagtttaaatttctcaatataaaggctgaaaatgctgcaccacaagatcttctatgtgatgaagcctcttggtttgaaagtaatgacaatccagaaatgccttctaattcaggcaatttgcaaaaggtgagtttcttcaaacctttccttccataaatataattgggtttcaattcattgatttagagataaaaagaatacagattaaatattccctgattacattattttattgattttctggtgtagagtagggtgtctaggaaattctttgtagaatttcctgtagaatatctgtgttgcagttgttctttcatagaaagcctccttttgatagtcttgaaacttttcttaatcctaatacactataatctgaaacatttttaatacagtattatctcacactgtcattttcagacatatctatccagaattagacccaaatcctcacaattaagtggtttacttagttttaatgcagtcaatcctaaaatatatgaaacattatgtatatcttaacacatttttaatgtaacctgtatataatatttttacttccctttgcatgtttttaaaagtatacacagatgttgcctatgtcagggcagtttttaacttctatgctaatcaaaagaaataatggcatctaaaatggcaactcttgtaatgggcactgtaatgaattggttcaaaatgtgtttgtgtagcatatgcctgtagtcccagctactcgggaggctgaggtgggaggatcccttgatcccaggaggtagcagctgcaatgagctataattgtgcccctgcactctagcctgggagacagagcgagactttgtctccaaaaaagtgtttgtggttgttggtacccttactgaaaatgggactagcataaatggtggtgaaatgtgatgataattcaaaatttacagaagattgtaatattatttctgttccccaaggtcctaagagatattttcataaaaatgaatggtaaacttcagagaacatttaaaattattcaaaataatctcttacactcttctaaatgcttcattatcttggggagggaaatattatgagtgtcatctctgcagatttagcagaaataaaatcctctgtgtgatagtttcacaaaacgatgcagtattaagttaggactctaagcgtcgctgttgaccaacctgggcaagaaaatcaacggaaactcaagttacatcctccaacaacaaagcaaattagacgggaaagcaggaaagctgtgcagaaattctgacctgaaacgcttcgcatccggtctctgcttgttgaaggaccttcaccgctatttctgagaagagcaaaagtgatgcagatctgttcttcctcttcttaatcccagagaagttcctaataagccagtaatggcgcctccgcagaggcatccgcagcgcagcgagcaggtcctgctcctcacgctcctggggacgctgtggggggccgcggcagcgcagatccgctactctattcccgaggagctggagaaaggctccttcgtaggcaacatcgtcaaggatctgggactggagccccaggagttggcggagcacggagtccgcatcgtctccagaggtaggatgcagcttttctctctgaatccgcgaaacggcagcttggtcaccgcgggtaggatagaccgcgaggagctctgtgctcagagcccgcggtgtctggtgagttttaacatccttgtcgaggataaactgaatctttatcccgtggaagtggaaatagtggacattaatgacaatacaccccgattcttaaaggaagaattggaagtgaaaattctcgaaaacgcagctccatcctctcgttttccactaatggaggtctatgaccctgatgtgggaatgaactcccttcagggatttaagctcagtggtaatagtcacttctcagtggacgtgcaaagcgaagcccatgggcccaagtacccggagctggtgctggagggcacactggaccgggaaggagaagccgtttaccgcctggtccttactgccatggatggcggcgaccctgtccgctcaagcgtcgcccaaattctggtaacagttctagatgtgaatgacaacactccaatgtttactcagcctgtctaccgtgtaagtgttcctgaaaacctgccagtaggcacaccagtgttggcagtgactgccaccgaccaggatgaaggagtccacggggaagtaacttattcctttgtgaagattacagaaaagatctcacaaattttctgtttgaatgttttgactggagaaatttcaacttctgcaaatctagactatgaggactcgagtttttatgagctgggtgttgaagcccgggatgggccaggtcttcgagacagagcgaaagtcttaataactatcttggatgtcaatgataatgtaccagaagtggttgttacatctggaagcagaacaattgctgaaagtgcacctccaggaacagtaatcgccctttttcaagtgttcgatcgagactctggcctgaatggcctggtaacctgttccatcccgagaagtctcccatttgaattggaaaaatcagttggcaattattatcgattagtgacaaatgcagctctagaccgggaagaggtattcttgtacaacatcactgtgacagccacggacaaaggaacaccacctctgtctacagaaacaatcatctctctaaatgtggcagacaccaacgacaacccgcccaccttcccccattcatcctactcagtctatgtccttgaaaacaaccccaggggtgcctccatcttctctgtgaatgcactggaccctgacgtggaccagaacgcccaagtctcctactcactggcagaagacaccctccagggggcgcccctgtcctcctacgtgtccatcaactccgacactgggattctgtacgccctgcgctccttcgactatgagcagttgagagacctacagctgtgggtgacagccagcgacagcggggacccgcctcttagcagcaacgtgtcactgagcctgtttgtgctggaccagaatgacaatgcgcccgagatcctgtaccccgccctccccacagacggttccactggcgtggagctggcgccccgctccgcagagcccggctacctggtgaccaaggtggtggcggtggacagagactcgggccagaacgcctggctgtcctaccgcctgctcaaggccagcgagccaggacttttctcagtgggcctgcacacgggcgaggtgcgcacggcgcgcgccctgctggacagagacgcgctcaagcagagcctagtggtggccgtccaggaccacggccagccccctctctccgccactgtcacgctcaccgtggccgtggccgacaggatccccgacatcctggccgacctgggcagcctcgagccctccgccaaacccaacgattcggacctcactctgtacctggtggtggcggtggccgcggtctcctgcgtcttcctggccttcgtcatcgtgctgctggcgctcagactgcagcgctggcacaagtcacgcctgctgcaggcttcgggaggtggcttagcgagcatgcccggctcgcactttgtgggcgtggaaggggttcgggctttcctgcagacctattcccacgaggtctcactcactgcagactcgcgtaagagtcatctgattttcccccagcccaactatgccgacacgcttatcaaccaggagagctatgagaaaagcgagcctcttctgataactcaggatttacttgaaacgaaaggagaacccaggcaacttcaggtgagtttctttccgcctaagcgggaagagtaatctgatcttcccgcaacccaactaatcagacaggctcatcagctagatcggctgttatagaagcgaacctcttttggtacaggaagattcgtgattttgtaaagtggaagactcccttgttcaggtgagggtatcgtttttttttttttttttttttgagacggagtctcgctctgtcgcccaggccggactgcggactgcagtggcgcaatctcggctcactgcaagctccgcttcccgggttcacgccattctcctgcctcagcctccctagtagctgggactacaggcgcccgccaccgcgcccggctaatttttttgtatttttagtagagacggggtttcaccttgttagccaggatggtctcgatctcctgacctcatgatccacccgcctcggcctcccaaagtgctgggattacaggcgtgagccaccgcgcccggccgagggtatcgtttttattggttgacaggaaaattcaagattgtctttgattagtgcttagttttcttagccctttgcagagagtcacataattctaatgtttttcttttatatcaaaagaatgttctgaagtcttaattttgtgggggaaaataatgcatgtcctagtttttctttacctttctcttcttggcaaactatttgtgtcttggattgagtacatctcgtttcttaggttttttcctactatgtgacatttgtaaggttctttctttttctaatgtgggaaaaaaaataaccttaatttaggtcagtgttaaagatcaagatcttggttttagctagcatggtggttcacgcctgtaatcccacctcttcaggaggctgaggcaggaggatcccttgagaccaggagtttgagaccagcctgggtgactctgtctctaccaaaaagaaaaaaaagtagccagatgtgtggcgtacacctgtagtcccagctactcgagaagctctgataggaggattgcttaagtccaggggtatgaggctgcagtgagatataattgtgtcactgcaccctagcctgggagacagaatgagactttttctctctctctctcaaaaaaaaaaaaagattttgttttttctcagtgttacttgataactataaacgacagacgttcatacaagagatctttcacctttactacttaggaatcaaaaattatttttgaaaagataagaatcattggtaactgcagcaggggacaccagatctttggtgttaaaagacctgaataacattcctgtaactatctgttatttacttgggccagttacaatcgccattatcttccaattaaaattaagatttaaaagacttctcttatcagagataggatccccctctgttgcccagtctggagtaaaaatccacctgtaactgctgcttatagagtgtgtatccagggcaacttgaatctatgttcctgggttgcaatcctaaagcttggctcaaataagctctacttatattattttttaaaacaagactttccttatctatctgactcaaattctaagaaaataattttataactttttttcaaactctaaagcagcatagtgaacacgtatttgttgacatcaccattattataattattgggttgttaacaataactaagcaccgatgctgtgtgcctactacagtgtcttttgcatactgtgtgcctgatagtatttaagagtgaaaatggccgggtgcggtggctcatgcctgtaatcccaacactttgggaggccaaggcaggcatctcacgaagtcaggagttcgagaccagcctgaccaacatggtgaaaccccgtctctactaaaaatacaaaaattagccaggtggggtggcatgggcctgtaatcgcagctactcgggaggctgaggcaggagaatcgcttgaacccatgaggcagaggttgcagtgagccaagatcgtgccactgcactccagtctgggtgacagagcgagactctgtctcaaaaaataataatgataattaataaataaagagtgaacatgaattttaaaacatgctcggtagtgtctgcttacaggacatatctctaaaaatagatgactgactggtgaatgggagaacaaatgttaatgaggttcaaataaaaatttaaatattttagcattttaacccagacaataaggctttcatcatataggaactctttattgaaatatttcaagaaaaaagggattatcatttagaagactgattagtcttatttattatgactgaaatgtgcaaacagaatcattgtttcatgaacagaaaacagcagagtttttgactgtcaatgatgttcgaatagaaaatggatcactaaggagataggagattctgttatcgacagtcttcaaaagtaagttgatggccctggaatgaatggagtacaggggattctctaatttgatgacttgttgaactacattatagtcaagatttttctccagtcatgagttggaagattctacaatctggtggtattatagaatggattggccacttgtgcatctgaatttgttatgaatgtgtaagaaaaaagcaattgagaagataccttgaaaataaatgagaacctcctttgtaacctgactttgtcagtcttcttaaagataacattgagttgatgtgtttttaaataagctgctaagagtaatatgtgtttttctgaaccaatattgtggtatttacatttaaggaattgttatagatttatttatttcaagtttccaaaggtatatacctaaacaagagatctaatcatacacatcttcaaagctcattttcttgtatctttgtgatataatttgataaaataacaattttaaacaacttgaatcttggatattagtctcatgagttagatgggctgttatacatatgattatttcataaactctgaaagtgtgaatgttattttactatactaccaatttgggatgttaaactacatcttgagcatttgttgttatagggaaagctcactaactacttttcatggagatcaggctggtttattttattctcttattacctgtgaccatttcatttaaacaaataaaatatttctctgatggaaaaactaccaacttctactctcacaaaagtcattcactcatgtggactgaccaactgttaaacatcctggcagtcatggaatttgctaagttatggctaaatgaggttctttaatccacctgcaatacagatcattaataataagataggctatctgaggttttgagagttcagtatagaattttgaagcatcaggaaaaaaaactaccaaattattgtcttattcttattttatggtctgtgaaagcctcttttttttttttttttttttttttttttttgtcagagtcttgctctgtctcccaggctggaatgcagtggtgtgatctctgctcactgcaacttcctcctcctgggttcaagcgattctcctgcctcagcctcccaagtagctgggattacaggtgcatgccaccatgcctagctaattttcatacttttagtagagatggggttttaccatgatggccaggctggtctcaaactcctgaccttaagtgatccacccgcctcagcctctcaaagggctgggattacaggcatgagccactgagcccggcctgaaaggcattcatttctgatcaggcttctgttgaggtggcaattgtcaaaggggaaggagtaaaatctcagaggagaaacattggaagatacctatatctttgcttgagaatgaaaatctaaatggaacttcaaagaactgttttgttgtttgttttttagaaaaaaaagtcccaaaaaagaaaagagagaagataatcaattcgatgcccaggaagccaaatagactttacatagaattctttttaatgcaaccaaacaaatggtcaggattcttcccaatatctcagtcaacaataatatacactctttaaactatgaaatgatttcaatttgatacaatgagcttatgttagattttattaaacatatcttggcggtctagtaaagatctttaatatttaattttatgatgttcgataacttagaaaatgtgaatgctagagacaatgaagccatttactccatagggtatgtatgctttgtgttcggagtagtctataatttaatttaactagctcttatttccttttctccaaagaaggtaccaagacactataaattaattgagacttttttaaaacagtagaataagaaacaaatgtgagatgaaactatgaattttgaggcatcaggtaaaaatggatcaagacattgagagctataacctccaaacatgaaagtttgtttgaaaatatctacaagtgcttacattgtttaataatcatacactttgcttgcctcaacaagaagttcaaaagtactattaaacaaatagaatttaactccagtttacagaattcatctataatacctctattagttcctttaaacaaaatttatctactttgtgaatgcaaagataactatggattattttgatagatcaaaacagaatgtccttcaaagtgttccctgtattctggagcaatgccaccagaaagcagaaataggttacttaggagcctcccacaaaacgaagttaagctttcttagtgttagttctggattctcctcctggttccaccaactactctccaggacctagaagaatttacaaaccaagactgtttcttgccaggtctttattccagagcaggtcattctcttttattctgcaactatgtgaaaggagctttcttttctttctgctagcagagggtagcctcggatccatcaataatttagttttactctatcaacatcagtggagagacgagtacctctaaggatcctgtcaggacagtcctgcattttgctcaaatgctgtctagagatccctgttttctcaattacactagaatagagtaggatgaagatttgaattgcatactaggatgaagacttgaattgaattgcataatgaaaagaatcagccaatccattatccagtttcttatgaattcacagcccagtaggatctctgcagatttctgccttctgtagaaaatgggttgcttctatagctgattgctgcagccaagacaaacaacgatttctttctttttttctcacaagactgggagtgagaatatttggattccgacattgttctactactatataatcaataatcaggaacaaggcaaggcaattccctctttctttctttctttctttcttcttcttttttttttttttttttttttggcagagttttgctcttgttgtccaggctggagtgcaatggtgtgatctcggctcaccacaacctccacctcccgggttcaagcgattttcctgcctcagcctcctgagtagctgggattacaggcgcgcgccaccacgcccggataattttgtatttttagtagagacggggtttctccatgttggtcaggctggtctcaagctcccgacctcaggtgatccgcccgcctcggcctcacaaagtgtgggattacaggcgtgagcaacagcacctggccccccctctcattttttaaacggttaaaatgaaggtgttagaccgtctctaaggttctatacaatcaaaaatttattaaaataggtctatatattttacaacaattttgactttctgaatcttgcatcatggtgtctagaacatatgtgttcaattaatactgaattaattaaaatttatatacactgatgtaaatattttctaagtaaaatctttcatatgtatttaaataaaatttacctttttgccttcaataactgattttcccatgtgcaataacgtgtgagtcagtgcccaaaagagtcacttgaaagttgcaaggcaaagcagttttttaaaaattatctaagattatcaaacaccggtccatgaacactgttgcattaattcagtgtcttaaaatggatttttaattatcagggatatctagagcaaagaaatctaacagggaaattttgaaagatgaaacaattttctatgaaatcagtgtattgtgtgcatcaatgtggtgcagtaacttagtaaggactcacagcgccgctgttcaccaaccagggaaaaatggtgcgagagatcccacagaaaccaccgagttttacagcacagagaaacgacagattgcgataagccctcttccaggctgcactaaactcaagcctctatcctgctggattctgagctccccttcctaagacagaggggtccacccggatacacccgcattctgaagcacttcccgagatcggcgcctaagcaagagaagcaggacgactatggcggctcagccgaggggcggggactacagaggattcttcctgctctccatcctcctggggaccccctgggaagcctgggcaggacgtattctctactccgtgtcggaggagacggacaaagggtcctttgtgggagacatcgccaaggacctggggctggagccccgggagctggcggagcgcggagtccgcatcatctccagaggtaggacgcagcttttcgccctgaaccagcgcagcggcagcttggtcactgcgggcaggatagaccgggaagagatctgcgctcagagtgcgcggtgtctggtaaactttaacatcctgatggaagataaaatgaatctttaccctatagacgtggaaataatagatattaatgacaacgttccaagattcttgacggaagaaataaatgtaaaaataatggagaatacagctcctggggttcggtttccgttaagcgaggctggggatccagatgtgggcacgaactccctccagagttaccagctcagccccaatcgccacttctccctggctgtgcaaagtggagacgatgaaactaagtacccggaactggtgctggagcgggtgctggaccgggaggaagagcgggttcaccacctggtcctcacagcctctgatggcggcgacccgccccgatccagcaccgcccacatccaggtgacagtggtggatgtgaatgaccacacgcctgtcttctctctgcctcagtaccaagtaactgtccccgagaatgtgccagtgggtacaagactgctcacggtacatgctatcgacctggacgagggagtcaatggggaagtgacatattcttttcggaaaataactcctaaacttccaaagatgtttcatctgaactcgcttacaggagaaatatcaactttagaaggattagattatgaagaaactgccttctatgaaatggaggttcaggctcaagatggtcctggtagtctgacaaaggcaaaagtactgatcacagttttagatgtaaatgataatgctccagaagtgactatgacgtctttaagtagctcaatccctgaagacacacctcttgggacagtcattgctcttttctacctacaagacagagattctggaaagaatggtgaggtgacctgcaccattccagaaaacctaccttttaaattagaaaaatcaatagataattattatagattggtcacaaccaaaaacttggaccgggaaacactctctttgtataacatcacactgaaagccacagatggtggaactcctcccttgtccagggaaactcacatattcatgcaggtggcagacaccaacgataacccacccaccttcccccactcatcctactcagtctacatcgctgagaacaaccccagaggggcctccattttcttagtgactgcacaggaccacgacagtgaggataatgcccagatcacttattccttggccgaagacaccatccagggggctccagtgtcctcctatgtctccataaactctgacactggagtcctgtacgcgctgcaatcctttgattatgagcagttgagagaactacaactaagagtgactgcacatgacagcggggacccgcctctcagcagcaacatgtcactgagcctgttcgtgctggaccagaatgacaacccgcccgagatcctgtacccggccctccccacagatggttctactggcatggagctggcaccccgctccgcagagcccggctacctggtgaccaaggtggtggcggtggacaaagattcaggccagaacgcctggctgtcatacctcctgcttaaggccagcgagccaggactctttgcggttgggctgtacacgggcgaggtgcgcacggctcgggccctgctggacagagatgccctcaagcagagcctcgtggtggccgtccaggaccacggtcagcctcctctgtcagccaccgtcacactcaccgtggctgtggctgacagcatccccgaagtcttggccgacctgggcagccttgagccctccgacggtccttacaactatgacctcacgttgtacctggtggtggcggtggccacagtctcctgcgtcttcctagccttcgtcctcgtactgctggcgctcaggctgcggcgctggcacaagtcacgcctgctgcaggcttcagaaggtggcttggcgaacgtgcccacctcgcactttgtgggcatggacggggtgcaggctttcctgcagacctattcccatgaggtctccctcaccgcggactctcggaagagtcacctgatcttcccccagcccaactatgtagacatgctcatcagccaggagagctgtgagaaaaatgattctttgctaacatccgtagattttcaggaatgtaaagaaaacctgccaagtattcaggtgagcccagcccttcctttatttccatgaggaatttatttgcatgatatttctctattattttgcaaaacaaatgttttgaaaatagggatttaaaaaactttatagaggtaaaaatgagtttaccagtttccttcagtggtgacactttaatatagaacacataggatatagtatttctttagtgaaagcctatggacaagattatgaatatgtggactatcacattttataatttccacctactttccaatctatgttccaacctactttcttaactcatatattttatacattggaatgaatcgagtctttcatattgcacaaggttagcaggaataaaacacacctcagctgtcttctcaggattctctttagcattcaaatatgtaaaaggttctgaaagatttcttccatgtgaagatttttttctgtggctgattctgcctccatgtacctcagcttggtggtcctaaaaaatcttgattgcttcttgacctatttacagtataatcatttattaatggggtggtagtagaaggttggatttatgcctaaagaatgaaatgtgtgtgtatcacacttcactaagatctatatcaaagacagacatcaagtctaatgccacactaaaggccatcggacaaaaccaataaaatatgtcaaataaaatgtcattttaagtgttgtaattggcatttgtgacataggcaattacatgttttaacagagaattccagtatgttgttttagtggtacagccagatgaagtgtgtctgtgggctatcaaagtgggagattggggatactggctttgtttcaactgtctcacgtactcaaaccttagaccatcttatgtacacagatcctagaccagtagttgattttatttattaggtctactgaaaaattcagttggaaataacccaatctgggattaactacttccatattcttttgtataacattttagtaaagctcagtatatcaagtgattgtcatccagaaggggtggatgacaaggtaatcttgattccagagacctttgagtattaattaaaaacacacttttagccaggtatggtgttgcaagctgtagcccacctgcatgggaggctgaggcaagaggacagcttgaacccaagaattggaggcccacctagataatataacaagactctgtctcttcaaaaaaagactctttttagactagtgttgtatttggtagtattttgcacatgatagactctgtacaatagtgtgggggatacattttttttttttgacatggagtctcgctctgtcacccaggctggatacattttacaagttctgcagtgttcacatttcagatgtacaatcacttggggtagaagacaatgttgctgacaccaacaatgttactgagggaagatcctatggcagaactacggttataaggtattttgtaaaagaaaatctcctgaccaaaatttattagatgcataaaattgtttttaagcaatggagagacataatcactaaactcagtgagctattgcaatcaaactttccagggattgtttccttcaattcagaggtcaccaaggaatgtaaaataagtgcagaggtaggaagcagtgcttcagtgcagcagatctcagtgactttgtgttttgaggctatgtattatccccctgataactttgaagatgaatgttgtatttcataaccagtaaaataattgtgtaatgaggagaggagtaggctactgcctgtgatcatcgaaatgagaatcacataatattcctgtaatgaaatcactgaaactattgggaagggggtgtatttgaagataagtataaattgcaccttctaaaaggcaattttggtattactgatactctccggaaaaagttgaaataaatcaacttggaggtacttagaaaagtggagaaaatgttaggaacaatgaaagaaagataaaatgtatccagtatatttctaatgagtaagtatggaaaattactgtactctgagacggtttaggccaagtctgtgttatggctatctttatatagatagtgcatgtttgaagattggggaaagcttatgtcaataaatgtttatgtacttaatctacatgatttgcctaaaaatcctcaaagttgggatgaaggcattcctaagagtacatttttagacgtcattaaatatacagacgtatccacgtagtttttgttctttcagttaggcacacaattataattattgcactggttaacttgaagcagcagaggctgtagtttcctagtgctgactctgggcgccgctgttggccaaagtggagagcttggcgctccagatctcctcgcgcagccgcagcgcgctttccagggcagccccagctcagactccccagcgccagcctttacaccgcttcctcctcggaaaaagaagaattttttcttgaactggaactgcaactaaagtccgttcggagatccaaaaatctgcaatacagaggttatttgtaacccggcgtctccaggctggtgagcaagctgaggagagcaagagggatggggagcggcgccggggagctgggccgggctgagaggctgccagtgctctttctcttcctgctgtctttgttctgcccggcgctctgtgagcagatccgctacaggattcccgaggaaatgcccaagggctccgtagtggggaacctcgccacggacctggggttcagcgtccaggagttaccgactcgaaaactgcgcgtcagttcggagaagccttacttcaccgtgagcgcagagagcggggagttgcttgtgagcagcaggctagacagggaggagatatgcgggaagaagccagcttgtgctctggaatttgaggctgttgctgaaaatccactgaacttttatcacgtgaatgtggagatcgaggacattaatgaccacacgccaaaattcacgcaaaattcctttgagctgcaaataagtgagtctgcacagcctggcacacgatttatattaggatctgcccatgatgcggatattggtagcaacacactgcagaattaccaactcagtcccagtgatcatttctcactgataaataaagagaaatcagatggcagtaaataccctgagatggtattgaagacacctttggacagagaaaagcagaaatcctaccacttgactttgactgccttggactttggagctccacccctaagcagcactgcacagatacacgttctagtgactgatgccaatgataatgctccagtgttcagtcaagacgtatacagggtgagcctttcagaaaacgtgtacccggggaccacggtgctacaggtgactgccacggaccaggatgagggtgtcaatgccgagattactttctctttcagtgaagctagccagatcacccaatttgacctgaactctaacaccggggaaattactgttttaaatacattagattttgaagaagtcaaagaatattccatagttttggaagcaagggacggtggaggaatgattgcgcaatgcacagtggaggtagaagtcatagatgaaaatgacaacgccccagaagtgatattccagtctctacccaacctaattatggaggacgccgagctgggaacacatattgctttgctcaaagtccgtgacaaggattccagacacaatggagaagtgacttgtaaattggaaggtgatgttccatttaaaatattaacttcttcaagaaacacgtataaattagtgacagatgctgttctagaccgcgagcagaatccagagtacaatataaccgttacggcaacagatcggggcaagcctcccctctcctccagttccagcatcaccctgcacattggtgatgtaaatgacaacgctccggttttctcacagtcttcctatatagtccacgtggccgagaacaacccgcctggagcctctatttcacaagtcagggcttctgatccggacttggggcccaacggccaagtctcttactgcatcatggccagtgacctggagcagcgggagctgtcatcctacgtgtccataagcgcggagagcggggtggtgttcgcgcagcgcgccttcgaccacgagcagctgcgcgccttcgaactcacactgcaggcccgcgaccagggctcgccagcgctcagcgcgaacgtgagcctgcgcgtgttagtggacgaccgcaacgacaatgcgccacgggtgctgtaccccgcgctgggtcccgacggctctgcgctcttcgatatggtgccgcacgctgcagagcctggctacttggtgaccaaggtagtggcggtggacgcagactcaggacacaacgcctggctgtcctaccacgtgctgcaggctagcgagcccgggctcttcagcctggggctgcgcacgggcgaagtgcgcacagcgcgtgccttaggcgacagggacgccgtccgccagcgccttctggtcgccgtgcgtgacggtggacagccaccactctcggccactgccacgttgcacctggtcttcgccgacagcttgcaggaggtgctgccggatatcactgaccgccccgacccctctgacctccaggctgagctgcagttttacctagtggtggccttggccttgatctcagtgctcttcctcgtggccatgattctggccattgccttgcgcctgcgacgctcctccagccccgcctcctggagctgcttccagcctggtctctgtgttaaatccgaatccgtggttccccccaactacagcgaggggactttgccttattcctacaatctatgtgttgcacatacaggaaagacggagtttaatttcctaaaatgtagtgagcagttgagttcaggacaagacatactttgcggtgattcatctggggccttatttccactttgtaattccagtgaattgacttcccatcaggtgagtttcctttaagtataatttaatgctcattgcctacccatttctccatattcacaagaaaatatacatatttgcaggaaaatatataatttttagatgtcatggatcattttaggaaagttgtagtcagttaaaaagctgtcatatcattctacaaaggaggagtaaagtaggagcaattgtgtggcccaacatttgtttgttttttagccaagcttagatttataaagcaatgagggtgtggttttaaccacaaagtgaaagtgttagacagttgttggctctctcctaaaaagtgaatgagatttttcctatacattttccttcttgttgactaatatatgatgaatacttttttcagcttggatataccataaatataaaaataataaagccaaagaatttaagctaaaattcaacacttttcttaactaatttaactggtatggtctccatagtagtccactgttttgtttcctgtgttaacttcccttttgtttcaaaagctcttagaataaggagtcaactggatttttatgtccatggaccccttgtgattatatgcagtgtacgctgtgtgtgcgtgtgtgtgtgtgtgtgtgtgagagagatccttttacttagaaaaaggtctactatgctcattagaagatcaaaagcagattctccttacttgtaacataggagtttcaggattaatctgtattcaagctcattctatatccttcatcaaagaaaagacaatgttttgtgtctgttgtccctctcacacacagccctaatatataatgtgtaactgccttatctgcagccctaaactaatatagctagaggtcttctaatcattctcctacctctaggaaagaaatatagtcttgaaaactgccaatctggtgtgcatacaaaatatatacaaaataccaaggaacattatatgagccttttgctaggtatatctaagcaactgcttcagttaatggccactttacaaattgctgaaagaaggaaacgtctttcgattcttttttttttctttttttttttttgagacagagtctctgtctgttactcaggctgtagtgcagtggcacaatgatagctccctccagcctcaaactcctgggctcaagcattccttctgcatcagcctcctgactagctggaactcaggctcatgccaccagacctggctaatttttctgttttcagtagagaaaatattttctttcactaatttaactggtatggtttccattgtctacccagttttccatatgcataagaaaatatattcacaggaaaatataaagttttcagatttcatgagtggttttaagaaagttttagtcagtgaaaaaactatcataccagtcttcaaaggaagggtgaaataagttcatctgctacgttgcccaggctggtcttgaagggaaacagacttttttgtagtcatacttatcctttggcttcttagtaagtattatatagtcattactttttgcagttttttagatcaaagtgttaatgtaggtaaagttaattttagaatatatgtaaaagtcaagtctgctttaaatttaatcatctctttggtgaaagggatgggatggagctttgctttttatcatatattcatctgtacctttcaagtattcaaatagaaaaatataaacaatgtaaataaaatagcaaaacaatgtaatatctcataaaactgcaatggtaaaagcatttatcctattgaaattccacaatttttatttgaaaatattatcgacatgtaattcaagtggcatttagaagaataatttaaaagcaacaactctatagaaagcttgtaaaatgattaagtagtttaaaccaaataaaacaatttctgagtcagtcatctccagtaggtctattttagtctcaagataaattcatttctggtgacaactgaagttcttagttatttgttagtatatattggagacatttacaataaagcttagagcacaatgggaaatgaaagtatcatgttttttttaagaccaaatgtattgcagaaatgtgagtaatttaatccgatgctacaatctgatcattctgatctaatctgatcatttaataacactaaataaaaccttcatctcacattctttggctgtttcttttaaaatatgggtttacggataaatcaaataaattcaaaacaaagtaataagcaaatgatttttttttctcagtaatctagtagagtattacatttagaagtaatctgtatctcagtgcagtaactatttaggactgtaagcgccgctgttcacctactggaagacaaatgcaaccgaaaacactcagatctcacacctcacgaagacccgcagatgccacaaactaactgctggactgcagcgaaacccgacccctgtttggaggcactccaggtttccggaggattgtcatctccatagctgcggcaagaaactaaataagacccatttatgcacagtgaagattctgagaggattctgcagcaaaacaacaatggccgctccacagagtcgccccagacgcggcgagctgatcctgctgtgcgcgctgctgggaacgctgtgggaaatcgggaggggacagattcgctactctgtgccagaagagacggacaaaggctccttcgtgggtaatatctccaaggacctggggctggacccccggaagctggcgaagcacggagtccgtatcgtctccagaggtaggacgcagctctttgctctgaacccgcgcagcggcagcttgatcaccgcgggcaggatagatcgggaggagctctgcgctcagagcccgcggtgtctgataaatattaacaccctggttgaggataaaggaaaactctttggggtagaaatagaaataattgatattaacgataataacccaaaattccaggtcgaagatctagaagtaaaaattaacgaaatcgcggttcctggagcacgttatccactcccagaagctgttgacccggatgtgggcgtgaactccctccagagctaccagctcagccccaatcaccacttctccctggacgtgcagactggagacaatggagccataaacccagagctggtgctggagcgcgccctggacagggaggaagaggctgctcaccacctggtcctcacggcctcggatggcggcaagccgcctcgctctagcacagtgcgcatccacgtgacagtgttggatacaaatgacaatgccccggtttttcctcacccgatttaccgagtgaaagtccttgagaacatgcccccaggcacgcggctgcttactgtaacagccagcgacccggatgagggaatcaacggaaaagtggcatacaaattccggaaaattaatgaaaaacaaactccgttattccagcttaatgaaaatactggggaaatatcaatagcaaaaagtctagattatgaagaatgttcattttatgaaatggaaatacaagccgaagatgtgggggcacttctggggaggaccaaattgctcatttcggtggaagatgtaaatgacaatagaccagaagtgatcattacgtctttgtttagcccagtgttagaaaattctcttcccgggacagtaattgccttcttgagtgtgcatgaccaagactctggaaagaatggtcaagttgtctgttacacacgtgataatttaccttttaaattagaaaagtcaataggtaattattatagattagtgacaaggaaatatttggaccgagaaaatgtctctatctacaatatcacagtgatggcctcagatctaggaacaccacctctgtccactgaaactcaaatcgctctgcacgtggcagacattaacgacaaccctcctactttccctcatgcctcctactcagcgtatatcctagagaacaacctgagaggagcctccatcttttccttgactgcacacgaccccgacagccaggagaatgcccaggtcacttactctgtgaccgaggacacgctgcagggggcgcccctgtcctcgtatatctccatcaactctgacaccggtgtcctgtatgcgctgcaatctttcgactatgagcagatccgagacctgcagctactggtaacagccagcgacagcggggacccgcccctcagcagcaacatgtcactgagcctgttcgtgctggaccagaatgacaacgcgcccgagatcctgtaccccgccctccccacagacggttccactggcgtggagctggcgccccgctccgcagagcgtggctacctggtgaccaaggtggtggcggtggacagagactcgggccagaacgcctggctgtcctaccgcctgctcaaggccagcgagccgggactcttctcggtgggtctgcacacgggcgaggtgcgcacggcgcgagccctgctggacagagatgcgctcaagcagagcctcgtggtggccgtccaggaccatggccagccccctctctccgccactgtcacgctcaccgtagccgtggctgacagcatccccgaagtcctgaccgagttgggcagtctgaagccttcggtcgacccgaacgattcgagccttacactctatctcgtggtggcagtggctgccatctcctgtgtcttcctcgcctttgtcgctgtgcttctggggctcaggctgaggcgctggcacaagtcacgcctgctccaggattccggtggcagattggtaggcgtgcctgcctcacattttgtgggtgttgaggaggtacaggctttcctgcagacctattcccaggaagtctccctcaccgccgactcgcggaagagtcacctgatctttccccagcccaactacgcagacatgctcatcagtcaggagggctgtgagaaaaatgattctttgttaacatccgtagattttcatgaatataagaatgaagctgatcatggtcaggtgagtttagttctttgcttgcttttaatttccagatgaattttatttggcataaattatgttttgaaaaacattgtgaagatagttgaaaataatttttaaggtgtatcacagagttttgggtttattttggtggtgttactataaaattgaactctaatagtcataggttattgtttcatttgcttttaaacgacttggaaaagattgttcaaccattttaagccttccagtattttattcctattatcactcattcacttaagaagtagctacccgtccatactggtaattttgctattgtttgtgtgtgtgtgtgtgtgtgtgtgtgtgtgtgtgtgtgtgtgtgtgtgtatcccaaactagaacttcagaaaattatcaagaagtctaaagccttgttattagcttagcaaaagtaaaatatatctcagaatttttagggttatgtttagcatttgaacctgtaactaggctcttgtagatttcttcactttaaacctcttttctgagccctgtttctgtaccagtgcccttcaaaactttaatacttcttaccatccttcaaaacatgaacaaactttaaagatggatcttggtgggagatgagactggttactaaatattaagtatgtgagtcagtggtcacctgggctccatgcccatggagacatgaaatctaaagcctagaatgtccattgctcccccaaacaaaaaacaaaagcaaaaacattagatctgaattaaaatgtaattttaaactgttgaaagtgacttttgtaaaatatgtaagaacatatttcaatacaattccaattagctgtttcggttgtgcattgatgtgaagtggtgagaatgttgatattaagaaccaatgtttcaggtacacaagttctaaataagctgatcaattcaattaaagttattcagtcttggctggacacagtgcctcatgtctgaaatcccagcactttgggaggctggggcaggaggaccgcttgagccccgggggtttgaaactgcagtgagctatgatcatgccactgcactccagcctaggtggcagaactagaccctgtctctaaaaaaactattattaggccgggtgcggtggctcacgcctgtaatcccagcactttgggagactgaggtgggtggatcacctgaggtcaggagttcaagatcagcctggcaaacatggtgaaaccccgtctctactaaaaactacaaaaattagccaggcatggtggcatgcgcctgtggtcccagctactcgggaggctgaggcagaagaatcacttgaacccgggaggtggaggttgcagtgagcctcgatcctgtcactgcactccagcctgggcaacagggtgagactccgtctcaaaaaaaaaaaaaactaatattaatagtaaaaactcggtataggctatccattattgtattcctgcataccttcttgtagcatttgaataaagctaatacctgaattgattgttgtaaggtagaagtagatgacccaataaatgtttgttattaatgaaaaggacatttcctaaggattgtgtagtgttctactgtatggtgcatattcagtggagtgggagttaacttcatagtttgtgtaccatttggatgcacatttgagaggacaacatattattggcactttgcaattttaaaaactcggatgaaagttgccctggtaggaaagaaaatccttactctccctaaaaatgttggctagttgtttttattaatctgacaaatggactaaagaaggttgaccaatgtccacaaatttatgtaaatgaacttatgagcttcatttatccaattccaaagtcatttcagataggataataatgcaatccactagaatatccctttgtaccttgtattgcagaatagataagcatttccccaataactcttaagaatgaatttatgtactgtaaaagatatgacataagagaagtattttgagatatgaagaagagcaacgtagtagggtatatcatttcttagctacatcatatgggcagtatacttgaatgaatatttcctgaagtagaagagtaaagaaaaattatttttataaagaatgttaatatagtcaggaagaggagatgtttggggattggtataaaattgccacaactttacaaaatagttttaaatagtatagatttccctaatatgtgtaatataaaacactagaaatattggggagttggaaatcatagaaatgaacagaagaatgataaaattgtttccatagctaataaaaaatgaatttttgaaatcagtatagtatgaaggctctgagagcaagaactgtatcatattaattattatattgccagtgacaagggcaatacttagttctagctaagagttcaaggtatgtttgcagaatggtgaaagaatggaccaatgtatgcaggtttgtataaaaacccaacgtgatatttctaacaatttggaaaacagagaaagataccttaaagaagttgttataattttttattaagtatatggacgtaaaaacttggcttgttaagttaggcacacaaaaacaattactgcactggttaacttgaagccgcagaggctgtagtttcctagtgctgactctgggcgccgctgttggccaaagtgcagagcttggcgctccagatctcctcgcgcagccgcagcgcgctttccagggcagccccagctcagactccccagcgccggcctttacaccgcttcctcctcggaaaaagaatcgtttcctaaactggaactggaactaaagcccgttcggagatccaaaaatctacaatacagaggttatttgtaacctggcgtctccaggctggtgagcaagctgaggagagcaagagggatggggagcggcgccggggagctgggccgggctgagaggctgccagtgctctttctcttcctgctgtctttgttctgcccggcgctctgtgagcagatccgctacaggattcccgaggaaatgcccaagggctccgtagtggggaacctcgccacggacctggggttcagcgtccaggagttaccgactcgaaaactgcgcgtcagttcggagaagccttacttcaccgtgagcgcagagagcggggagttgcttgtgagcagcaggctagacagggaggagatatgcgggaagaagccagcttgtgctctggaatttgaggctgttgctgaaaatccactgaacttttatcacgtgaatgtggagatcgaggacattaatgaccacacgccaaaattcacgcaaaattcctttgagctgcaaataagtgagtctgcacagcctggcacaagatttatactagaagtagcagaagatgcagatattggcttaaactctctgcagaagtataaactctctcttaacccaagtttctcattaataattaaggagaaacaggatggtagtaaatacccggaactggcactggagaaaaccttagaccgggaacaacagagttaccatcgtttagtcctgactgccttggacggtggacatccacccctaagcggcaccactgagctccggatccaggtaaccgacgccaatgataatcccccggtattcaaccgagacgtgtacagagtcagccttcgggaaaacgtgccaccaggcaccactgtgttgcaagtgtcagccactgaccaagacgagggcatcaactcagaaattacttattccttctacagaaccgggcaaatctttagtctgaattcaaagagcggagaaattaccactcaaaagaaactggattttgaagagaccaaggaatattcaatggttgtagaagggagggatggtggtggactggttgcacaatgtacagttgaaattaatattcaagatgaaaatgacaatagcccagaagttacattccattctctacttgaaatgattctggaaaacgcggtgcctggaacactaattgctttgatcaaaatacatgaccaagattctggggaaaatggggaggttaattgtcaattacaaggcgaagtcccttttaagattatctcttcatccaaaaattcgtataagttggtaacagatggaaccctagaccgagagcaaaccccggagtacaatgtcaccatcacagccacagacaggggcaagccgcccctctcctccagcataagcgtcatcctacatatcagagacgtcaacgataacgctccggttttccaccaggcgtcctacttagtcagtgtacccgaaaacaaccctcctggggcctccatcgcgcaagtctgcgcctcggacctggacttggggttgaacggccaagtctcctactctatcatggccagcgacctagagcctctggcactggcctcttacgtgtccatgagcgcgcaaagtggggtggtgttcgcgcagcgcgcctttgactacgagcagctgcgcaccttcgaactcacactacaggcccgcgaccagggctcgcctgcgctcagcgcaaacgtgagcctgcgcgtgttggtgggcgaccgaaacgacaacgcaccgcgggtgctgtaccccgcgctgggtcccgacggctctgcgctcttcgatatggtgccgcgcgctgcagagcccggctacctggtgaccaaggtagtggccgtggacgcagactcaggacacaacgcctggctgtcctaccacgtgctgcaggctagcgagcccgggctcttcagcctggggctgcgcacaggagaggtgcgcacagcgcgtgccttgggcgacagggacgcggcccgccagcgcctgctggttgctgtgcgtgatggtggacagccgccactctccgccaccgccacgctgcacttggtctttgctgacagcttgcaggaggtgctgccggatatcactgaccgccctgtaccctctgacccccaggctgagctgcagttttacctagtggtggccttggccttgatctcagtgctcttcctcctggccgtgattctggccgttgccttgcgcctgcgacgctcctccagccctgccgcctggagctgcttccaacctggtctctgtgtcaagtctggacctgtggttccccccaactacagtcaggggactttgccttattcctacaacctatgtgttgcacatacaggaaagacggagtttaatttcctaaaatgtagtgagcaattgagttcaggacaagacatactttgtggtgattcatctggggccttatttccactttgtaattccagcgagtcgacttcccatcctgagttggtgagtttcatttatgtctattctttttcattacccacccaattttctgtatttacatgaaactatcgtacattttcaagtccaatgagttgtcttagggaagtcagagctgctcagaaagctgtcctaccattctttaagaggagcagtaaattgtgagtttttatgtcgcataaaagaagtagccttatagatttacaaagtagtgagagtttgctcttagcttcctctctagcaaaaacatttggtgcgtttttttgtcctctttctcaaagctaatgaattttacctattcgttgtctcattctttaacatgtttatattttattgtatgtagataaaccattaaatttaatgtatgtaatcatttaattcatcttttaaagcaaagaaactgctagtagatgtctttcttcactgatttcactggtagttttcatctctttcttatgttcctcatatatgctttcttattcctacctaatggatttatgattttttgaatctcctaaaattttattaaaaatactatatgttggctgggtgcagtggctcatgcctgtaatcccagcactttgggaggccgaggcggttggatcacatggtcaggagttcaagaccagcctgggcaatatggtgaaaacccgtctctactaaaaatacaaaaattagctgggtgtggtggcgggcgcctgtaatcccagctactcaggaggctaagacaggagaattgcttgaacctggcaggtggaggttgcggtgagccgagatcactccattgcattccagcctgggcaacaagagcaaaactccatctcaaaaaaaaggaaggagaaggagaggaagaagaagaaaaatactacatgttatgtgtatgagagagaaagagagagactgattcactgaacttagaaggtccaaatcatccaaataattttctaagtttatccaggttttcttggatgcaaaatccttttccacctctatataattaccagaagaaacttacaaaaaaaaggaaatgctattgcctgaatttctcttgctcggaatcctgacatattcttgaagaaggggaaaaagacaccggatttgtcttatcgtttggagctttaaatataaatgactggatgttttctcaacatccttgtaggatggaaggtgaatacaggattattccatttttaagacaaaaactactagtcttgtgtacatacaaagctcccattacatggtataagtcttttgcttggtttcccttagtatgtgattcagtaaatgggttccttacaaagtgctgagatttcttataataccacttacttttaacctttcagtagttttctttgttgtatattttgtgttctttttcccaaattattatataagtttaagtgatgcttagaataatgtttaagaccactttaaaattgcataatttattgatgaaggattaaaatagaaacttgcttttcagtgtatatgcatttgaatcattgaaacacagtctgtgcatgcattacatattcacattaaaaaactaagcatttttgaaatagcagaaaagtttaagcaattacaaaaatgtgaaaatttccaactttaatcctgttaatatttagcaatattaggcgagaacatctgtaactattgctgaattaatattacttttataatacaaaaatttaaaataaacgtttttccaggaattttatcatcaaaataaaccccagaaaataatttcaaagtggataatctatccttatatatgtattaatacaattatatattttacatttacaaatatataggtataaaaattaaaaatgaatgtacttccaaacaagattgcacataaaaattacttcagaaaattgttaagatacacagaaaaaattgaagcatcataaaaaggaaattataatagtttacatatctagaaatagagtgcaaagttctaccaagaataagaataaattaatattaagcaatggtttgtgattttataatacacttacagaaattttattccactttatttacaactcagatatctaaaaaatagattgcttttgaaatacaaatgcaagaaacaattggagaaatctaaaatcataattagaagagagtagtgttttctttatcagccatctgatataatgttacacatcagtgggtgtagtaacggcttaggactctgagcgccgctgttgatcaactctaagcgaaaatcaggactccatccggatttccagttctgcggctacacaaaacccggcagataccacaaacctgctcccaggctgcagcaaaactcagcctctttcttctaaggaaaagatcaccatactttgcagggtggaagaaagaacctgatgaagcagcgcgcacagagatccttttgagaaaattccaaagcgaggcagcaatggcagctccaaccaaatgccagctccgcggaagattagtcctgctatgctcgctcctggggatgctatgggaggccagggccagtcagattcgctactcagtgcctgaagagacagaaaagggctatattgtgggcaacatctccaaggacctggctctggagccccgggagctggcggagcgccgagtccgcatcgtctctagaggtaggacgcagcttttctctctgaacccgcgcagcggcaccttggtcaccgcgggtaggatagaccgggaggagctctgtgctcagagcccgcggtgtctggtgaactttaaagtcctggttgaagacagagtgaaactgtacggaatagaaatagaagtaactgatattaacgacagcgccccaaagttccaggccgaaagtctggaagtaaaaattaacgaaatcgcggttcctggagcacgttatccacttccagaagctattgatccggatgttggcgtgaactccctccagagctaccagctcagccccaatcaccacttctccctgaacgtgcagactggagacaatggagccataaacccagagctggtgctggagcgcgccctggacagggaggaggcaactgcccaccacctggtcctcacggcctcggatggcggcgagccgcgtcgctccagcacagtgcgcatccatgtgacagtgttggatacaaatgataatgccccggtttttgctcaacggatttaccgagttaaagtccttgagaacgtgcccccaggcacctggctgcttactgcaacagccagcgacctggatgagggaatcaacggaaaagtggcatacaaattctggaaaattaatgaaaaacaatctctgctattccagcttaatgaaaatactggggaaatatcaacagcaaaaagtctagattatgaagaatgttcattttatgaaatggaaatacaagctgaagatggtgggggattgaaagggtggacaaaagtgctcatttcggtggaagatgtaaatgacaatagacctgaagtgaccattacatctctgtttagcccagtgagagaagacgcacctcagggaacagtaattcttcttttcaatgctcatgaccgagactccgggaagaatggtcaagttgtctgttctatccaggagaatctatcttttacattagaaaattcagaagaagattattacagattgttgacggcccaaattcttgaccgagaaaaagcctcagaatataatatcacggtgactgcaacagacagaggaactccgcccctgtccacagaaattcacatcaccctgcaagtgactgacatcaatgataatccacctgctttctctcaagcctcctactcagtctacctcccggaaaacaacgccagaggtacttccatcttctccgtgattgcctatgaccctgatagcaatgagaattctagagttatttactccttggcagaggataccatccaagggtctcctctctccacctatgtctctattaactcagacactggtgtgctgtatgctctgtgctcctttgactatgagcagtttagagatttgcaaatgcaggtgacggcaagtgacagtggaagcccaccacttagcagcaatgtgtcattgagactgtttgttttggaccagaatgacaatgccccagaaatcctgtaccctgccctccccactgatggttctactggtgtggagctggcaccccgctctgcagagcctggctacctggtgaccaaggtggtggcagtggacagagactcaggccagaatgcttggctctcctaccgcctattcaaggccagtgagccagggctcttctcggtggggctgcacacaggtgaagtgcgcacagctcgggccctgctagatagagatgcgctcaaacagagccttgtggtggctgtacaggaccatggccagccccctctctcggccactgtcacgctcacagtagccatagctgacagcatcccagacatcctggctgacctgggcagtcttcagatccctgcagacctggaggcctcagaccttaccctctacctcgttgtggctgtggcagtcgtctcctgtgtcttcctcaccttcgttatcacgctgctggccctcaggctgaggcactggcactcctcgcatctgctgcgggctaccagtgatgggttggctggtgtgcccacctcacactttgtgggtgtagatggggttcgagctttcctacagacctattctcaggagttctccctcaccgctgactcaaggaagagtcacctgatcttcccccagcccaactatgcagacacactcatcagccagcagagctgtgagaaaaatgagcctttgtgcgtctctgttgattccaagtttcctatagaagacacccctttggttccggtgagttcattttttttctttctttcttttctttttttgttttttgttttgttttgtttttgagacagagtcttactctgttacccaggctggaatgcagtggtgtgatctcggctcattgcaacctccgcctcccaaattcaagcgattctcctgcctcagcctcccaagtagagtagctgggactagagtagagtagctgggactacaggcctcccaagtagaataactgggactacaggcacgtgccaccacgcccggctaattttttgtgtgtttttagtagagacggggtgtcaccatgttggccaggctggtcttgaattcctaacctcaagtgatccacccacctcagcctcccaaagcactgggattacaggcgtgagccactgcgcctggcccttaactttctattatagttagctttctctttaactgtctgtacttaaggtagtataagttgatatcagtgtgtttctcatcacttttcactgggcctaattgttgctccaacactgaaaggaggcatttattagttatatttgctgatataactttcatgttctcataataattaacctgctgtcaacgtaaaccatacttcatggggtagctctcagcctgcattgatgtgggctttttgggtagggttgcttcattggttgcagtggactcatatcataaaattcttactcctttttttttttttttaagagatgggggtgtcattctgttgtccagggtggaatgcagtggtgtgggtaaagcttactgcagtctcaatctcctgggcttatgcaatcctcccacctcagccttcacagtagctaggactgaggtgggagggctagcaagctatgttgcccagactggtctcaaacgatcttcctgcttcagtttcccaaagcactgggtgaggtgtgaaccacctcacccagcaaattcttactcctacgatcatttattcaggtcatactatgtttgtaagggtaaactgataaaaaggtaaatgtattcttcttagagaaacagctgaaagcccagatttattgcttctattcttccatttctatgacaggaaaacacctctttgaggttatatttttcagatcacaagtgtgtaaagtctgtttgtgtttacagatattttctgacgaagattcaaacttcagttatccacttccaaaccctagtaaaccaattttttccctttaatggtgaaagttgtcacatcttttattctcatatcttcaaaggtcttaatttcctaatgctttaatgttaaattatggagaatagtaggacattcttcttttctatagtatatgcttgctcaagagaagtttctaagactggacactgtgaaatgacaaaacaaggaattaaaaatatttctctcacttatatattatttctggctcaattctccaacttttgagtctagaaatgaacttgcatatcagatataatttaagaaaatattctcaggaactgctgggaagattctaaaactattttactgtttttagctataaggaagagaataatgtattatttaatgttattttaaacatagtgttgtttcaaatagtaaataacatttcacaagacatttgaaaataagctttgaagttgactcaaaattctatgctaaacatgtgatccatagatacactgatgactgctggcatttctgtggaaatgaagaattgttttatttgtttgtaattatttgggtttcagttgctttatttttaagaaaaaaaagctgaagtgtctgggaatcctttatgacatacagacattttaattatttcaaacacgttttcccccttaagtgggtagcaaaaaaaataaagcatacttcaggctcatatttttaaccatgcaacaagaaaattgttacaatttctgttctgaggagtagccttcatacttagtatttataaatattgaaatgtatgttaatttggggaaaacataacagatatccatgaaggcttgtatgtcatggtaggtagttactattcgataccacaaaaatgtctcttgcccttaaaaccagaacacgaggctcaccagacagatgactgaatggagtatggaaaatctttatttctgtttttcttaggctatgtaggacttaacttattgtgcattggtaacagattgtagaacataagctgaaagataaaattcttgaccttaatgtctcatcttaaaaagaagcattggttgacattctatatctcgtattacttaaaaataatgggggagcgcagtatatattaaacaaagattggctttgtggtgatcattgttgaaggtggggtgatggctatgtgaaggttcactatatatactccctactgttgtataagtttgaaattgtgcataatagatttatttaaaacacaaagcatagaaatatctactataatattatggtgagagcaaaatttgagggggatgtacacctgcattttcgaagaatatatacatttcggagaccgaattcaaaatgaaaaaccgggctgctgtcccgcacggagcctctgggcgccgctgtcggccagtgcagagcaagcgctgacgccggggatccgtcagcctctggcctgggattccctgcgcagccaacaacagaaagaagaaaaccagctcccacacagagcctcccggctgcgcagacctttcccagcacagcggattgccagctccgagacccgggactcctcctgtcctgggccgaatgctcttttagcgcggtagagtgcactttctccaactggaaaagcggggacccagcgagaacccgagcgaacgatgggagggagctgcgcgcagaggcgccgggccggcccgcggcaggtgctatttcctttgctgctgcctttgttctaccccaccctgagtgagccgatccgctactcgattccggaggagctggccaagggctcggtggtggggaacctcgctaaggatctagggctcagtgtcctggatgtgtcggctcgcaagctgcgagtgagcgcggagaagctgcacttcagcgtagacgcggagagcggggacttacttgtgaagaaccgaatagaccgtgagcaaatatgcaaagagagaagaagatgtgagttgcaattggaagctgtggtggaaaatcctttaaatatttttcatgtcattgtggtgattgaggatgttaatgaccacgcccctcaatttgataaaaaggaaatacatttagaaattttcgaatctgcatccgctggtacacgactatcgcttgaccctgccacggatcctgatataaacataaactcaattaaagattataagataaactctaatccttatttttcattaatggttagagttaattccgatggtggcaaatacccagagttatctctggagaaactcctagaccgggaagaacagagatctcatagcttgatattgactgccttggacggaggggacccaccaagaagtgccaccgctcacatagaaatttctgtcaaggataccaatgataaccccccggttttcagcagagacgaatatagaattagtcttagtgaaaatctgccccctgggtcccctgtgttgcaagtgacagccactgaccaggatgagggggtcaatgctgagataaactactacttccgaagcactgcccagagcacaaaacatatgttctcattggatgagaaaacaggtatgattaagaataaccagtcatttgattttgaagatgtagaaaggtacaccatggaagtggaagcgaaggacggaggtggtctctctacccagtgtaaagtaatcatagaaatccttgatgaaaacgacaacagcccagaaataatcatcacttctctctctgatcagattttggagaattcacctccaggaatggttgttgccctcttcaaaacacgggatctggatttcggaggaaatggagaagtcaggtgtaatatagaaacagacattccattcaagatttattcttcttccaataactactacaaactggtgacagatggagccctggaccgagagcagacaccagaatacaatgtcaccatcgtagccactgacaggggcaagccgcctctttcttccagtagaagcatcaccttgtatgtcgctgacatcaacgacaacgccccagttttcgaccagacgtcctacgtggtccacgtggccgagaacaacccgccaggagcctccattgcgcaagtgagcgcctctgacccggatttggggctcaatggccacatctcctactctatagtggcgagtgacctagagcccctggcggtgtcgtcatacgtgtcagtgagcgcgcagagcggggtggtgttcgcgcagcgcgcctttgatcacgagcagctgcgcgccttcgcgctcacgctgcaggcccgcgaccacggctcgcccacgctcagcgccaacgtgagcctgcgcgtgttggtgggagaccgcaatgacaacgcaccgcgggtgctgtacccagctctgggtcctgacggctccgcgttcttcgatatggtacctcgctctgcagagcccggctacctagtgactaaggtggtagcggtggacgccgactcgggacacaacgcctggctgtcctaccacgtgctgcaggccagtgagcccggactcttcagcctggggctgcgcactggggaggtgcgcacggctcgagccttaggcgacagggacgcagcccgccagcgcctgctggtcgctgtgcgtgacggtggacagccgccactctctgccaccgccacgcttcatctggtcttcgcagacaacttgcaagagatactgccagacctcagcgaccgccctgtactctctgacccccaggctgaactgcagttttacctggtggtggccttggccttaatctcagtgctcttcctcctcgccgtgattctggccattgccttgcgcctgcgacgctctctcagccctgctacttgggactgcttccatcctggtctctgtgtcaagtctggacctgtagttccccccaactacagtgaggggactttgccttattcttataatctgtgcattgcacatacgggtacaaaagagtttaatttcctaaaatgcagtgtgcccctacattccaatgaagacatggtttgcagtgtttctcctggagccttaattccacctcatggtggggaggatttgacttcacatcctgagactctgacttcggtgagtttctcttttttgtgtgtgatttatctaatagtctactagtttctcatattttaggcatactactttattttcatatctagaatcatatgtttaaaatccatagctttttacaatattttctcaatgttttttcaattatagttttcactatgtatttggttcataagttgctctatctttttgtaaaataatgtcaccagactgaagatattttgtctttgtcttttttttttttttttttttttgagatggagtctcgcactgttgcctaggctggagtgcagtggcgtgatctctgctcactgcaacctccgccttctgggttcaagcgattctcctgcctcagcctcccaagtagctgggattactggtgcccctcaccacagctaaattttttgtatttttagtagacatggggtttcactatgtcgaccaggctgttcagaaactcctgtcctcgtgatcctcccaccttggcctctcaaagtgctgggattacaggcgtgagccacaatattttgtcaagttctgactatcgaacagaagcagtggtcttggcatctaagaaaacaaacaagtaacctatctattcaaatttgcgaagacttagtgaatttacgatatcttatttatatatttttaaagcctaaaaatattcagaagacaggcccagtggctcacacctataatcacagcactttgataggctgaatcggaaagtatcacttgagcccaagaattgagaccagcctgggcaatatagggagaccccccatctctactaaaacaacaacaacaaaaaaaaacattagcagagtgtggtagcattcccctgtggtcccagctacttgggaggctgagctgggtggattgcttggtcctgggaggtcaaggttgcagtgagccctgatcttgccactgcactccagcctgggcgacagagtgcgaccctgtctctaaaataaataaataaatatgcaggcagggccaagtgtgctgtaatcccagcactttgggaggtggaggtggagaatctcttgagcgcaggaatttgagaccagcctgggcaacacagggagactccatcgctacagaacatttaaaaattagcagggtgtggtggcacatgcctgtggtctcagctactctggtggctgtggtgggagaatcgcttgagcccaggaagtctaggctgcagtgagctgtctaggtgacagagtgagaccctgtctcaaaaaaaaaagacatttctaagaaataaatgaaatactattgcctttgcactcagtctctgtctctgattctctgatagaagatttttgaagaaaaaagataaaatctttgaagagttctatacttggaaggcatagtgacataaacacttctgaacatcctgttctctgtgtgaaagaagtgaacttctataccctttgcatttgagggaacaattgctactgggttgatgggcacacacagttgaagatatgtgaaccactggactttggcctctgatacaaactgcctaagagaagagattatttatactggtattaatgctctgatgaaaacaggtcatttgacataaacacttacttgttaaaaacctatatcactacatctaactttgttttctaaaacttttagtacttcaaattctacgtatttcttttctcattacaatgcaaacagtttaatttgcaactgtaatatatgttcattttagtttgtgattacctgcttaatcatttaaataggtccatttaacttgtatccctgtaagataaagtatgttttacacaaaaaggttaattaaggctcagtaaaactattctagaagagtactttaaaaacctcttacacaatcctaagctaaataagtttaatgaattaagtagttacaattataaagcttcagagtgaattatctcatgagtttatttaatataatctttgtatgaatgtatactaaataaaattggcctattcaaatcacaattttaaattataagacttttctgaatttacctagacactaatatgacctaaaataagtattatttaccttttattaaagtgtgtacatttctgttgggaaaacgtgttgcaaatatatatttaaccaaacattatcttgaaatatttacaatattttcactccactttatcacacctcccctaagaaacctacatatagtaaattatttaaagataggagtggagaaaccaaagaatctatgtaaaatataataatccaacagaatagtttactttccattgcatgtatcacttgggtgcagtaacttcttaggactctgagcgccgctgttcacctactaggagagaaaacgcagccagagctcaatccggattctcagggcttcaactacacaagccccacaaaccggctgctgggctgcagggaagctcactccagaatttaaagtgcccaggctacagagacaccctgaagccacagaaagacaaaggaaccggttgaaacacacaacgtgtccagtgaggactttgcagaattctgtaaccagactacaatggccgctcaaaggaatcgctcaaaggaatcaaaggattgcagcgggctggtcctgctctgccttttcttcgggattccatgggaggctggagcccggcagatctcctactcaattcctgaggaattagagaaaggctctttcgtgggcaacatctccaaggacttgggtctggcgccccgggagctggcggagcgcggagtccgcatagtctccagaggtaggacgcagcttttctctctgaacccgcgcagcggcagcttgatcaccgcgggcaggatagaccgggaggagctctgcgctcagagcgcgcggtgcgtggtgagttttaatatccttgtggaagacagggtgaaactttttgggatagaaatagaagtaactgatatcaatgacaatgctccaaaattccaagcagaaaatctagacgtaaaaattaatgaaaatgtcgctgcgggaatgcgttttcctctcccggaagctattgatccggatgtgggcgtgaactccctgcagagctatcagctcagccccaataagcacttctccctaagagttcagagccgtgccaatggcgtcaagtacccggagctggtactggagcactccctagatcgcgaggaagaggccattcaccacctggtcctcaccgcctccgacgggggtgaccctctccgatctggcactgtccttgtcagtgtgactgtcttcgatgcaaatgacaacgcgccggtcttcaccttgccagaataccgagtgagtgttcctgagaatttgcctgtgggcactcagctgctgacagtcacagccaccgacagggacgaaggtgccaatggagaagtgacatattcattccgaaaattacctgacacgcaattgttgaagttccaactaaacaaatatactggagaaataaaaatatcagaaaatctagattatgaagaaaccggtttctatgaaatagaaatacaagcagaagatggaggagcatatcttgcaactgcaaaagtgttgattacagtagaagatgtaaatgacaacagtccagagctgaccatcacgtctctatttagtccagtgactgaagattcacctctgggaacagtcgtagcccttttaaatgtgcatgatttagactctgagcagaatggacaggtaacctgttccattttggcgtatctaccatttaaattagaaaagtccattgacagttattacagattggtgatacacagagcccttgacagggaacaggtatcctcttacaatatcacagtgacagccacagatgggggaagtcctcctctatcaacggaagctcactttatgctacaagtggcagatatcaatgacaacccacctaccttctctcaagtctcctactttacctatatcccagagaacaacgccaggggtgcctccatcttctcagtgacagcgctggacccggacagcaaagagaatgcccagattatttactccctggctgaagacaccatccagggggtacctctgtcctcatacatatccatcaactcagacactggcgtcctgtatgcactcagatccttcgactatgagcagtttcatgagctacagatgcaggtgacagccagcgacagcggggatcctccactcagcagcaacgtgtcgttgagcctgtttgtgctggaccagaacgacaatgcgcccgagatcctgtaccccgccctccccacagacggttccacaggcgtggagctggcgccccgctccgcagagcccggctacctggtgaccaaggtggtggcggtggacagagactccggccagaacgcctggctgtcctaccgtctgctcaaggccagcgagccgggactcttcgcggtgggggagcacacgggcgaggtgcgcacggcgcgagccctgctggacagagacgcgctcaagcaaagcctcgtagtggccgtccaggaccacggccagccccctctctccgccactgtcacgctcaccgtggccgtggccgacagcatcccccaagtcctggcggacctcggcagcttcgagtctccagctaactctgaaacctcagacctcactctgtacctggtggtagcggtggccgcggtctcctgcgtcttcctggccttcgtcatcgtgctgctggcgcacaggctgcggcgctggcacaagtcacgcctgctgcaggcttcaggaggcggcttgacaggtgtgtccggctcgcactttgtgggcgtggacggggttcgggctttcctgcagacctattcccacgaggtctctctcaccgcggactcgcgaaagagtcacctgatcttcccccagcccaattatgcggacacgctcatcagccaggagagctgtgagaaaaacgatcctttgtctttgttagatgattcgaagtttcctatagaggataccccattggttccagtgagttttattttcatttttacttttgttaaaaaaaaaaagattggtttttactttgaagtttgcggcatgatggtggaaagtgtaaatgctaaaacactgatgagtagaatttgatgtttattaaggttttttttttttttttttttttttttttttttactttctggtaaaattcacctagtctcaatcaaggcctatatatcataaggctttgttatgattagctttgcagaaccttgtagtttatagtgttgttgagtacaatattgacaattcctaagacagacttccatacagaagtgcctgtcaatttatatttcctcctgggtggtcacatattgaaactccagccccttaagcaaccctcttgttctgaaggcaggtctggtaagaataggtaagtatcagaaagaaatcacctctggaaacacaacccaaatccaagaatactcaatgcagttcttcccaaggagaagggcaataggcctttttcaaactacattttatatatttttcaatctatactttgtggtgatagttgcagttgaatatactaagtttttcattaatattgaattaacaatttatttataacaatgtatgcttagatttttccagccctatttataactgataacactgcagtatcctttttgcatacaattctctaatttcacactgctatgtggaagatatagcattttaatttaactttcattgctcaatagggatcctgaggaggctatagagggtgaaattaagaatatttgggattctgcttttgtcttttttgttaaattttctagtgactaaggctgaaagtaaatatgggttgggaagacagataaatttgtacatgttcccgagaacaggagcaagagatatatgacaaagctatttcagtggctctttaatgtataaggaggcaaacacctgaaactctgaaaactctgaaattgagaggcaaaataaacttagagtcaagaaagaaatgccatttctgcagatcagaatataaacaccaaccacagctgtaaaaaagaaaagaatatatgcaacgaagggaaattatataaacaaaggatcattggaggtactgatgagttcatttagttcaatgaaaatagtgacgtattaggtagatctcttaattttattactagtattctactaaatgtggtagtataaagtcaaaaagcattccgaagtttctcaagacccttataattccatgatttttttcaggtcagtcaacatttgttgaatgataggtctgtggaaggaaagcacactctttagggtcatagttattaactattaaaccattgaaactattattttatatttgtgttaatgagagtcaaaattattgtgcattcatctcaaataattctattattttgaaaaatacaggttttttttttaaaaaaaactgctcttgacattgtagctattgtgagaaaatattttgattataattatttaaaagcaatacaggacaccctggatgatggtaatgactagggcaatggttgcattccagtacttaagtatgaaataaggaattattactttctgggtgaatataggctagaattgaagacaaaaaaatttgttgcttatcttcagtacttccagcttcatagataattactcttaaaaggaacaagaatgactgcctctggatggaggaattggatagcaatgggccgtgggataggagacctataaaccttcatgctatattattttgtgcctttttaaattttgaagaaaaaatattcatttattcaagatatatgtaaattcagtaaataaaaagatatgatagttatgaccaagtggaaatatatttcctgatgtaaaaggaatcactgaggaaaaagattaaaatattttggctgtcaactcgtagtttaaaaaaaattccttgaaagaggtagagaaaagtcaagttgcagtcccacacagagcctctgggcgccgccgtcggccagtgcagagcaagcgctgacgccggggatccctcagcctctagcctgggattccctgcgcagccaacaacagaaaagaaaaccagctcccacacagaggctcccggctgcgcagaccttgcccagcacaccagattgccagctccgagacccgggactcctcctgtcctgggccgaatgctcttttagcgcggtagagtgcactttctccaactggaaaagcggggacccagcgagaacccgagcgaacgatgggagggagctgcgcgcagaggcgccgggccggcccgcggcaggtactatttcctttgctgctgcctttgttctaccccacgctgtgtgagccgatccgctactcgattccggaggagctggccaagggctcggtggtggggaacctcgctaaggatctagggcttagtgtcctggatgtgtcggctcgcgagctgcgagtgagcgcggagaagctgcacttcagcgtagacgcgcagagcggggacttacttgtgaaggaccgaatagaccgtgagcaaatatgcaaagagagaagaagatgtgagttgcaattggaagctgtggtggaaaatcctttaaatatttttcatgtcattgtggtgattgaggatgttaatgaccacgcccctcaattccggaaagatgaaataaacttagaaatcagtgaatccgtcagcctggggatgggaacaattcttgagtctgcagaagatcctgatattagtatgaattcgctgagcaaataccaactaagtcctaacgagtatttctcattggtggagaaagacaatcctgatggtggcaaatatccagaattagtattgcagaagactctggaccgagaaacgcagagcgctcaccacttggtactgaccgccttagatggtggggaccctccccgaagcggtactgctcagataagaatcctggtaatagatgccaatgacaaccccccagtgttcagccaggacgtgtacagggttagccttcgggaagacgtgcctccaggcacctccatcctgagagtgaaggccactgaccaggacgagggcatcaactcagagatcacttattccttctttggtgtggctgacaaagctcagcacgtgttctctctggattacactacaggaaacattctaactcagcagcctttggattttgaagaagtagaaagatatacgataaacatagaagcaaaagaccgaggatctctctcaacacggtgtaaagtaattgtagaagttgtagacgaaaacgacaacagcccagaaataatcatcacgtcactctctgatcagattatggaggattcccctccaggagtggttgttgccctcttcaaaacacgggaccaagactcaggggaaaatggggaagtcaggtgtagcttaagtagaggtgttccatttaagattcattcttcttctaataattactacaagctagtaacagatgaggccctggatcgggagcagaccccagagtacaacgtcaccatcgcagccacagacaggggcaagcctccgttatcctccagcaaaaccataaccctgcacattactgacgtcaatgacaacgcgccggttttcggacagtcagcctacctggtccacgtgccagaaaacaaccagccgggtgcctccatagcgcaagtcagtgcctctgacccagacttcgggctcaacggccgtgtctcctactctctcattgccagcgacctggagtcacgaacgctgtcgtcctacgtgtccgtgagcgcgcagagcggggtggtgttcgcgcagcgcgccttcgaccacgagcagctgcgcaccttcgagctcacgctgcaggcccgcgaccagggctcgcccgcgctcagcgccaatgtgagcctgcgcgtgttggtgggcgaccgtaacgacaacgcaccgcgggtgctgtaccctgcgctgggtcccgacggctccgcgctcttcgacacagtgccgcgggccgcgcagccaggctacctggtgaccaaggtggtggccgtggacgcggactcggggcacaatgcctggctgtcctaccacgtggtgcaggccagtgagcccgggctcttcagcctggggctgcgaacaggcgaggtgcgcatggtgcgtgctttgggtgacaaggactcggtccgccagcgcctgctagtcgctgtaagagatggaggacagccacccctttcagccactgccacgctgcacctggtgttcgcagatagcttgcaagaggtactgccggatttcagcgaccatcccacaccctctgactcccaggctgagatgcagttttacctggtggtggccttggccttgatttctgtgctctttctcctcgcggtgattctagctattgctctacgcctgcgacagtctttcagccctactgcaggagactgctttgagtcagttctctgctccaagtccggacctgtgggtccccccaactacagtgagggaacgttgccctatgcctataatttttgtgtgcctggggatcaaatgaatccagaatttaattttttcacatctgttgatcattgtccagccacacaagataacctcaacaaagatagcatgctactggctagcattttaactcccagcgttgaagcagataagaagattcttaaacaggtaagtatttaaaaatgtatttaatcctttttatattacaatatgccaatatattccaatatagtggtattattttaagattctagataacttcttcatagagttcgcaaaatataggtcaaatttatggttatcattattaaaacaaaagtttaaattaaatgcctcagtcttcctactattcaaagacattttaaagcaaactacatgggtaatctccggtgacatttttatgaagtaaaatacctttcggttaaaaatataaaatacaggtatatttttacggcatggtattttaattgaaaccctgatgctactcaatttttctcaagtatttcatcttcatttactcaataaaggaaccttgtaagaattatagttaggcatcctacctgatgattttatcgggaccgtattatttccacttccagaaatgtcgttcctttcagtcggttaaaatcaattggaaccaactacaacctacaagttttcagctccagtaatattttgaaaactttttaaaaattaagcaagcccttttaataattactcctttcgcaggtgttcttggtaaagttttaacgtcacataatgtaagtattgtgtatcatcgtttttaagctctacaaatacgtgtgattcacaaaggtgagcgtaatcatttcttctggaatttcttagtcgttgcaataataagaatgggctctaggcgccgctgctcaccaatcagggaatgggaagctgcgcgccattgagtccctccctcccccgcctctaccacacaaagcggaatgagatggatactcacagatcctgacactggagacttagaagtattttccttcgctttctgatatattttggatgtagtcggcctaggacttcatagatacataagccgattcacaaccaaccagctcgagaaaccgcggaatatcggcttagagcctgccatggcgaatcggctacagcgcggggaccgcagtcggctgctgctgctgctgtgcattttcctggggacgctgcgggggttccgggccaggcagatccgatattcggtgccagaagagaccgaaaagggctccttcgtgggcaatatctccaaggacctggggctggagccccgggagctggcgaagcgcggagtccgcatcgtctccagagggaagacacagcttttcgctgtgaatccgcgaagcggcagcttgatcacggcaggcaggatagaccgggaggagctctgtgagacggtgtcctcctgttttttaaatatggaacttctcgtggaagacaccttgaagatttacggagtggaggtggaaataatagatattaatgataacgcccccagcttccaggaggacgaagtggagataaaagtcagtgagcacgcaattcctggggcgcgatttgctcttcctaatgctagggatccagatgtgggcgtgaactccctccagagctaccagctcagccctaataattacttttccttgcaactgcggggcagaacggatggggccaagaatccagagctagtactggagggaagcctggaccgagagaaagaggctgctcacctgctcctcctcacagctttagatggaggcgatcccatccgaaagggcgcagttcccattcgtgtggtggtcctcgatgtaaatgatcacatcccaatgtttacacagtccgtatatcgcgtgagtgttccagaaaacatcagctccggaactcgggtgctgatggttaatgcaacggatccagacgagggaatcaacggggaagtaatgtattcatttcggaacatggaaagcaaggcttctgaaatattccaattggattcacaaactggagaagttcaagtacgggggtctctggattttgaaaaatatagattctatgagatggaaattcaaggccaagatggtggaggtctctttaccaccacgacgatgttgatcactgttgtggatgtgaatgataacgctccagaaataactatcacctcttctattaattcaattctggaaaactctcctccaggtacagtgattgctcttctaaatgtgcaagatcaagattctggagaaaatggtcaagtctcctgttttattcctaaccacctgccttttaaattagaaaagacttatggaaattattacaaattgataacaagcagagtgctggacagggagttggtccagagctacaatataacgttgacagccacagaccagggaagcccgcctttgtctgcagaaactcatgtctggctgaatgtggcagatgacaacgataaccctcccgtttttcctcactcctcttactctgcctacattcccgaaaacaaccccaggggtgcctccatcttctcagtgaccgccctcgacccggacagcaaacagaatgccctggtcacttactctctgacggatgacactgtccagggggtgcctctgtcctcctatgtctctattaactccaacactggtgttctctatgccctacaatccttcgactatgagcagtttcgagacttagaactgagagtgatagcacgtgacagcggggacccgcccctcagcagcaacgtgtcgctgagcctgttcgtgctggaccagaacgacaatgcgcccgagatcctgtaccctgccctccccacagacggctccactggcgtggagctggcgccccgctctgcggaacctggctacctggtgaccaaggtggttgcggtggacaaagattcaggccagaacgcctggctgtcctatcgcctgcttaaggccagcgagccgggactcttcgcggtgggggagcacacgggcgaggtgcgtacagcgcgggcactgctggacagagacgcgctcaagcagagcctcgtggtggccgtccaggaccacggccagccccctctctcggccaccgtcacgctcaccgtggctgtggccgacagcatccccgaagtcctggcggacctcggcagcctcgagtctctggctaactctgaaacctcagacctctcgctgtacttggtggtggcggtggccgcagtctcctgcatcttcctggtctttgtcatcgtgctgctggcactcaggctgtggcgctggcataagtcacgcctgctgcaggcttctgaaggcgggttggcaggtatgcccacgtcacattttgtaggcgtggacggggtacaggctttcctgcaaacctattcccacgaggtctctctcattgcggactcgcagaagagtcacctgattttcccccagcccaactatggggacacgctcatcagccaggagagctgtgagaaaagcgagccactcttgatagctgaagactcagctatcattttaggcaaatgtgacccgacaagtaatcaggtgagatttatttctctgcctcctaattgttggtgtcttggcacaagtcttttaaggagatgttttttgagcctgttatgaaaactgtttggggggggggtggggcggcatatatttagttcatatatatttagagcaatacatgtgagttttactttgcctttcatgagattacgataatctttcagaacgtttttgtgaaagtcatttttcaatcttggcatattttcttttgatttcaaaggggccattcaactatgctggtttggtttgaagtaagttgaattttagtattatttttctattatcagtgtatgaggctctcaatttattatatatagatacaaattaatgattcacaaacactttttatttccatttcaattttgctgtgccttcactgatttgtagttatattccaccattatttgctattactgctaatgttcaaattttgatcctgttgatttaatagcatgctccctctagctctccttctcatctatctatctatacacatgcacacacacttatacacgtaagcttttctctgagcaattttattttgattcttggtggctggtaatatgcttagatcctgttgactatttcaactttgtctcatttcttcatcctatcaacacagacatattgactggcttttaactactggatttccttgggagataaaatttagatcacattttttcttaagctctagatgtcttttccattactatggtgaagttacattgactgttctgaggaaataattgaattattgaactggtattatttccttttattcttttactttggtgtctgtgtttgtatgtatggaaggttttttaatgtagtaaatccatatatagaaataacttgattttgattcagtgcttctcaaaaacctattttcaaatgtgctaaagatgtctacagatttattcaaatagagtagtttgtgaatatataaatagattgaaggtatttggactttaattaaactgatttagctagtatccttctggctatttttttgttcattttcagtgtagttgggagtcatagattccttctttctttctttataaggtcattcttatggcaaatagtacattcagttcttttattcagaccaacttgttattgaagcttgatagttgcctgacatacatgttatctgaagcaatgtctaggaaagccaaatgaggaaaggagacttatctagggtttttgatcacaggaatcatttccataatcaattcagtcaacactctcacatcacttctaggtatttgccccaaattacttggatatttatgttccctttcaagtttagttttctcatttaggaatttaccttatgtcattagttgtaaactgactatctagggctcggacaaaaataatttcaactgtaggaaaggcaagtcttccaacagatgcctacatttttcttgaagtcaagaaaaatgttcaggtattttgagcatctagggataggatttatacttgtggaattccaaactgagaaaaatgatgtaaggcattgtactttgactggaattagttaaataaaaaggatatgaggtatttggctgggaaaaggagattgttccatattataaaacctcatctaaactaacttcccaagatcgtggagaacaaaaaggaagggttggctttgaaatgtgatattaagagggttatgttgattcggaggtagtgataaagttctgttaaggtataacatatagtcccattaaatagaggataaaaataaaacaccatcacatttcatgttattaattcctatggcaacctactaggctatacctttatattctctttatgatgaaacatgaaacaataatccttttcagaaacctcttttataagtgataagaagggtttggctaactttattctgaatatgccctatatagctttcagtgctcctccagttttctctgataaaactaggaggaaaattatctgcacatcagattgaaaataatactgcatatcatttcatagtggtcaaaattttcccataccacttgatggggatgttttcccacaaggtttttgttctacaacaggagagaagactttgcctagttcttccaatatgtgcattgcttctgcttagaaaaaaacaaacttttaaattctctttgctgggttaatgactgttctatagattcccatctctaaggaatcttctttggtagtaaacactggaaaacagtcactacgaaaactcataaaatgtctagtttcctatacattagtccaacacatcagtctaattctgaatcccattgaattagcaaaggcttccggctgcagttttctaaatagactcagagccctgctgttggccaatgtgctgcaagaactggagcctgggatctaccaggacgatattctgttcagtcacagaagcaagtcggagagtggccaagacttgggctttctgctcctgcaaatctgattccatacggattggggtgccctcaaactgggagcattgagttttctatgtatggaagtaaatattttaaaagcactttgtgaaacattttctcttaacgtcggagactgcagcaacgcatgggaaggatgggaaacagggtgaagcagagaagcaggacccggcagtggcaagcactcttccctttcctgctgcctttgttctgcggggcaccctcggagcagatccgctactctattccagaagaaacggtccagggctccgtggtggggaaccttgcggaggacatgcggctgcatgttcaggatttattgacctgaaaccttagagttagtgcagagaaacaatactttaccgtgaacacggagaatgggaacatacttgtgagtgacagaatagatcgagagtcactgtcttcaaaatcctctgtgtcatacccttagagattgtagcagagaatcctctaaatgtttttcacataaatgtgatgatagaagatataaatgataacccacctcattttccccaaaatagcattgttttacaaatcaatgaactagcaattccaggcattcggtttggcctggaatctgctatagatgcagatgtagggcctcactctctccagagttaccagctcagttctaatgaacatttctctctgatgatggacaagactaaaggcaagaacgctccagaattagtgctggagaagcccctgggccaggagcaacagagctctcatctcctggtcctggaagcaatggacatgggtgacccagtcccaactggcactgctgcaattcaaattgaggtcactgatgccaacgataatgccccagtttttagccaggatgtatacaaagtcagccttagagagaatgtgcccccaggcacctctgtactaaaggtgacagccactgaccaggatgagggtgtcaatgcggagatcacctactctttcaaatccctacgagatgatattggaaatatgtttgtgctagaccatcaaaatggggaaattaaatccaaagacttaatagacttcgaatttcgtagcagttataccatgagagtagaagctaaggatggtggaggcatgaccagcgaatgtaaaattatactagaaatcctagatgagaatgacaatgccccagacgtggtttttacttcagtgtccagttctgtaactgaggacgcagaaccctggacggtgatcactctgttcaaaacacatgataaagattcgagagaaaatggggaggttacatgcctcataaacgaaagagttccttttagaatcgaatcttccgccaataatgactataagcttgtaacagatgggaccctggattgggagcggatcccggagtacaacgtcaccatcactgccactgacaagggcaagcctccgctctcatccagcacaagcctcaccctacgcattggtgaagtcaacgacaatgctccggttttccaccaagtctcctacgtggtccacgtggccgaaaacaaccttcccggagcctccatcccacaagtcagcgcctctgacctggacctagggctgaatggccaagtctcctactccatcgttaccactgacttggagctgcgggcactgtcgtcctacgtgtccgtgagcgcacagagcggggtggtggtcgcgcagcgtgccttcgaccacgagcagctgtgcgccttcgagctcacgatgcaggcccacgaccagggctcgcccgcgctcagcgccaacatgagccggcgcatgttggtgggcgacctcaatgacaatgtgccgcgggtgctgtaccccgcgctggggcccgatggctccgcactcttcgatatagtgccacgcgccgcagagtccggctacctggtgaccaaggtggtggcggtggacgcagattcgggacacaacgcttggctgtcctaccacgtgctgcaggccatcgagcccgggcttttcagcctggggctgcacacgggaacctgctggttgctgtgcgtgacggaggacagccgccgctctctgcgccgctacgcttcacctagtcttcgcagacagcctgcaggaggcactgccagacttcagtgacagtcctgtgccctctgattcccaagcaaagctgcagatttacctggtcgtggccttggccttgatttctatgctcttcttcctcgcagtgattttggcggtcgccttgcacctgcgatgctcttccagcccctctgcctggggttgctttcaccctggtctctgttctaagactagaccaggggtttttcccaactacaatgagggaactttgctttattcctgcaatctgtatgttccctcggattctagaaaaagaagatttaattttctcaccatgacaccagaaacagtccccccacaagatctttctaatgaagtttctctggtagcaagcttcactgaagagaataacaagataagctctaactctgttgctcctactcacgtgagttccaatgaatgtctttcatttacaaatggatgaggtttaattttcaaaccaatattttggcaagaaaatcttaaacatattatatctactattgcttcaggtttgtttgcccactcttaatatttcctgttcctttctgtgtgggccagtaacttcattattagctttcatgtatttttgaaacattttcaccatttttacgggagactttttttttttttggacggagtctcgctctgtggtccaggctggagtgcagtggcatgatctcggctcactgcaagctctgccttccgggttctggccattctcccgcctcagcctcccgggtagctgggactacaggcgcccgccaccacgcccggctaattttttgcatttttagtacagacggggtttcaccgtgttagccaggatggtctcgatttcctgacctcgtgatctgcccgcctcggcctcccaaagtgctgggattataggcgtgagccactgcacccggcccggagacattgtttatacacacacacacacacacacacacacacacacacacgtgtgaaaagtgggtattatgatactgctgtcattgagatattttaattgaggaataaatttttttcctgtgatgtttcttgggacatcaatatttgagtatataaggctttttctttaatccattaactataaattttgaagaaaatgcatgagaaaatggagaaaatgtgttttttttttaaaaaaaattgagattaaggtctcattatgttgcccaggctggactcaaactcttgggctacagtaatcctcccacctcaatctccagagtagctgagactacagttgcctgaaactgtgcctggcagagaaaaaagcttaaaaaaataagaacatggtaatgatttgataatattcagttacatttacttttgattcttgtaattcaagtaaactcaattttatgtctgatattttctcacagctacctatatatttcttcccaatttaaaatatattattttattttatgcctagcaaatatctttacagtataaatatttacgctcatgaaagtacgtagccagttatttcttagggagaattttttccctatattttgatgggcttccaaaagtattaccagtaattctcagtaattacaattaggtcagttacccaggaaaaggtaagtctgtaacattctttggactaccaattttcttttactaagtttcctgaacaataaatatttttgaaatataatgtattaatagaattctggagtacttccattatttccagtcaatgcaagttggaatgcttctactttatgctaaaaatattaatgtttctttttcacttgggttcttgttaagtgtgattctgataatgtatacaatcacatatcatttttaggtttccataatatcatgaaaatttgatttttaagcgttacatgtcaacaacctggtaaagtaatccttccattcaggatcattcaaggaatctatttaaaaatattttccccaaattatagctgaatcagaaagtttaaattattatattatatgatttgtcaaaaagagaaactcctagggagacatctccataataggtgtgttgggggaacagtaatctcaaagcagatgcactaacattataagattaaaatcattgtttatagaaacttccaattcatttaaaagctcattggggaaaaaaaagctcattgggaaaaaaaaaaaaagctcactaaagtttctattaaagcgaatacggtagatttccatccccttttgaagaacagtaggtggagctatttaagatataaaaacgaaatatcctttctgggagttcaagattgtgcagtaattggttaggactctgagcgccgctgttcaccaatcggggagagaaaagcggagatcctgctcgccttgcacgcgcctgaagcacaaagcagatagctaggaatgaaccatccctgggagtatgtggaaacaacggaggagctctgacttcccaactgtcccattctatgggcgaaggaactgctcctgacttcagtggttaagggcagaattgaaaataattctggaggaagataagaatgattcctgcgcgactgcaccgggactacaaagggcttgtcctgctgggaatcctcctggggactctgtgggagaccggatgcacccagatacgctattcagttccggaagagctggagaaaggctctagggtgggcgacatctccagggacctggggctggagccccgggagctcgcggagcgcggagtccgcatcatccccagaggtaggacgcagcttttcgccctgaatccgcgcagcggcagcttggtcacggcgggcaggatagaccgggaggagctctgtatgggggccatcaagtgtcaattaaatctagacattctgatggaggataaagtgaaaatatatggagtagaagtagaagtaagggacattaacgacaatgcgccttactttcgtgaaagtgaattagaaataaaaattagtgaaaatgcagccactgagatgcggttccctctaccccacgcctgggatccggatatcgggaagaactctctgcagagctacgagctcagcccgaacactcacttctccctcatcgtgcaaaatggagccgacggtagtaagtaccccgaattggtgctgaaacgcgccctggaccgcgaagaaaaggctgctcaccacctggtccttacggcctccgacgggggcgacccggtgcgcacaggcaccgcgcgcatccgcgtgatggttctggatgcgaacgacaacgcaccagcgtttgctcagcccgagtaccgcgcgagcgttccggagaatctggccttgggcacgcagctgcttgtagtcaacgctaccgaccctgacgaaggagtcaatgcggaagtgaggtattccttccggtatgtggacgacaaggcggcccaagttttcaaactagattgtaattcagggacaatatcaacaataggggagttggaccacgaggagtcaggattctaccagatggaagtgcaagcaatggataatgcaggatattctgcgcgagccaaagtcctgatcactgttctggacgtgaacgacaatgccccagaagtggtcctcacctctctcgccagctcggttcccgaaaactctcccagagggacattaattgcccttttaaatgtaaatgaccaagattctgaggaaaacggacaggtgatctgtttcatccaaggaaatctgccctttaaattagaaaaatcttacggaaattactatagtttagtcacagacatagtcttggatagggaacaggttcctagctacaacatcacagtgaccgccactgaccggggaaccccgcccctatccacggaaactcatatctcgctgaacgtggcagacaccaacgacaacccgccggtcttccctcaggcctcctattccgcttatatcccagagaacaatcccagaggagtttccctcgtctctgtgaccgcccacgaccccgactgtgaagagaacgcccagatcacttattccctggctgagaacaccatccaaggggcaagcctatcgtcctacgtgtccatcaactccgacactggggtactgtatgcgctgagctccttcgactacgagcagttccgagacttgcaagtgaaagtgatggcgcgggacaacgggcacccgcccctcagcagcaacgtgtcgttgagcctgttcgtgctggaccagaacgacaatgcgcccgagatcctgtaccccgccctccccacggacggttccactggcgtggagctggctccccgctccgcagagcccggctacctggtgaccaaggtggtggcggtggacagagactccggccagaacgcctggctgtcctaccgtctgctcaaggccagcgagccgggactcttctcggtgggtctgcacacgggcgaggtgcgcacggcgcgagccctgctggacagagacgcgctcaagcagagcctcgtagtggccgtccaggaccacggccagccccctctctccgccactgtcacgctcaccgtggccgtggccgacagcatcccccaagtcctggcggacctcggcagcctcgagtctccagctaactctgaaacctcagacctcactctgtacctggtggtagcggtggccgcggtctcctgcgtcttcctggccttcgtcatcttgctgctggcgctcaggctgcggcgctggcacaagtcacgcctgctgcaggcttcaggaggcggcttgacaggagcgccggcgtcgcactttgtgggcgtggacggggtgcaggctttcctgcagacctattcccacgaggtttccctcaccacggactcgcggaagagtcacctgatcttcccccagcccaactatgcagacatgctcgtcagccaggagagctttgaaaaaagcgagccccttttgctgtcaggtgattcggtattttctaaagacagtcatgggttaattgaggtgagtttatatcaaatcttctttcttttttttttttaattgctctgtctcccaagctggaatgcagcggtacgatcatagctcactgcagcctcaaactcctaggctcaagcaattatcccacctttgcctccggtgtaacagggactacaggtgcaagccacctactgtctgcctatctatctatctatctatctatctatctatctatctatctatctattactttcttgtacagacaggagtctcactatgttgagcaggctgatctgaaacttgggctcaggctagcctcctgcttctccctcccaaactgctgggattacaggcgtgaaccacagtgccccgcccttatcagatattcttttctggctgggcgcggtggctcacgcctgtaatcccagtactttgggaggccgaggcgggtggatcacctgaggttgggagtttgagaccagcctgaccaacatggagaaaccccgtctatactaaaaaaatacaaaattagccgggcgtggtggtgcatgtctgtaatcccagctacttgggaggctgagtcaggagaattgctttaacctgggaggtggaggttgcaatgagctgagattgtgccattgcactccagcctgggcaacaagagtgaaactctatctcaaaaaaaaaaaaaaaaaactttatcctctagtttcatccattgatgacacttgctttaatcacttattacaatcacctccaaatgaagattttataattccattgtttcttctacagttgttaattggctttctaccttgaagaagagttttatattctctatatatgtttgtttctatgattctggaagcatggttttctattttattcaatggcctgtaatctgttaatatcaattatttattttgatgctgaaattgtcccaggattggcctttgggactccctttaggctgatttctatgtcctttctgttacagcaagcttgggattatatccaagatttgtaattccaatgtacttacttctgtcagtgtaaacaaagtacgatttctggactagatgacttgggcattgtgggggaggtggaaattagaggtattctctgtttttcctgtaggatcttgcatttcttcctcttgctgcttgtctctttgtgtcgggaacaggccccccaaaatctggccataaactggccccaaaactggccataaacaaaatctctgcagcactgtgacatgttcatgatggccgtaatgcccatgctggaaggtagtgggtttaccggaatgagggcaaggaacacctggcccgcccagggcagaaaactgcttaaaggtgttcttaaaccacaaacaatagcatgagtgatctgtgccttaaggacatgcccctgctgcagataactacctcaatccatccctttatttccgcccatctcttcgtttcccataagggatacttttagttaatctaatatctatagaaatgatgctaatgactggcttgctgttaataaatatgtgggtaaatctctgttcagggctctcagctctgaaggctatgagacccctgattccccacttcacacttctaaaaaaaaaaaaatttttttttctgagcttggagaaatatatcccttagtacacttggcatttataaagcagacatcaataaatttatatatatgtgacagataccaacaacaatccagtccccttccctcataccttatttatgtacatatattttatataatagatataatttattaacaatttataaaattactttgttaatactctatatcattttctagctgaatttatcaatgataatgctcttttcccacttttatttttttcccattgaccatgcagcagttttgtgtagaccgtctgataacaactgatctgtttatctaggggggagaaatctaattcaatggaaaatataaataaaattgtgataaacttttgtaaatagagtggcttttaactacacttgagatggctagcaaattcataaagtgaatttactttctttcaaagttcagtaattctttctggccattagggatatgtccatttatactttctcagtatcccaagtcatttcatggttttaaatcattcatgaacttccaaatatagtgaatttatttcttctgcatttaaaattttatcacttaaatatacaatataccgtattgccatgacgaaaaatggtaaagactatttttcacttctgttatgcatttcattaatacgatatctgtatgtgtttccaagttagacatttcttttgcccatttcctacactaatgatactaatgatgactttgtggaatattcagaattaacaaaatgtgttttgagtgctttttttagtactggggcaaatttgcagtaatatcgcctgctttttacattaaattccccataacttttacaactatgggaaaatttctgaaacgtgcacagattccaagtgttttctgagaactttatgcttattgtagagtggttacagacactgaatgctaaagtgtattactctttgaaaagcattgcttgatttcttttggtgaattctgtaaaggtgcagggaaacataacgtcccaattattttttctttcttctttgtttgctgcctatctactttgaaagatacaatagttaaaacccagaaaagagattggaaaccccttagagaatgaaagacatccaagggctctaaaatgcggcagttgctgcttctgagaccaaaaaagggggcaaaatatagagtgtgtggttctacttgtgtgattttttgaaagaaagtatttgaatttatctaaaaatactaaatttgtatttacattagttttcaaatagaatttaataagtacagtgttctataggtaatattgagagaaatagaggacaatgaaacctctctcctccatcatcttgtatgaactaccaaaatgtttatcatatggacagttctcatatatagtcaaatagaaagaaagacataataggaaaacaaatgacttgggaaactaagctaacatggtctaattattctgacctctgctcacctaacttgatttaggaacaaatcattgagagttagagcatgaatagtcaagactgttagaccatatctcaaatatcagtgacttcaatcaactatgtttccagtttaagctgaataggctttattaaatagttgttgaatgaatggataaacaaataatgtactctggggattacctgataccaggattctgaattttcagatgtatcatagaaggatagcagctttgcaattaggtaaattgttaactgtgtcacctttagcaagttatttaatctctttgagcttcagcaaagtaggaataatcatatctaatttgaaaggtcgtggtgatggctagggctaacaaaaatctgattcacaacatgcaattaattaacagtagccatttttagtggttgaccaaaaaaaggatttatattttcaatgccagcacactcgatgttctgttgggaaaaataataatgatttttgtgtgcttctccatatggtataatggaatgatttgtggatggaaataaaactgttctaaaatttttgtgacagctggtttaaaaatcttaagtgcctaggcacattcttgattgagaagccacagttttaggccataaaagatgggggaaagatttttatatgagacaattttgtgagtgttactttttctttgtctgaaccatagtgaaatctaaacaaggatcttgtgaaacttattttaaagaagcagtttacttcaatgggatcttagataatttcaccagaaaatggatcaccgaaaccagaaggctggtgatcattatttggtttgggccatataagaattgaaactaacggcttagctttaggatttttaggacacttgttgataatttaggattcataattaacatatgtgttgattgttttctgagactaactgggcaatgggtttggatgtgtttacatttattctgattccagtcataaaattatgtcaaggactttccttgtctttttatgtgtatgacagatgtgtatgtatccatttcatctaacaagttaaagcgttcagctataatttaaaatttgtagcttcactgttttatagtacctaaaattggaatgtaatcagtcagaagacattcatccactgctttcattccagaagtattatgctttttgaagcagcaatagcataggaatgttgaggagactatactatacttttatagcatatttaatctcgtagatcacttttcaatgaattataaggctgatgacaaatgagcaaattgtatcagttttctttatgacatgtaacagagtatagctgtgatcatgaattggatagttctggtgtaaaaatctgctttatccccatataagatgtcaggttcagaaaagcaaacacatagtttcgaagagatgttgatcaaactgatgaggctaaatctcaagaaagagacacagttaccctctaatgttacactttgagttcacctttttttttttttttgagacagagtctcaatctgtcgccaagctggagtgcagtggcactatcttggctcactgcaacctctgcctcctgggttcatgctattctcctgccttagcctcccgagtagctgggactacaggcacacgccaccacacccagctaatttttgtatttttagtagagatggggtttcaccatattggccagaatggtcttgatctcttgatcttgggatgcacccaccccacctcagcctcccaaatagctgagattacaggtgtgagccaccatgcccgaccactttgagttcacttttaagaaaccatacttaatggaaaattaccagtaacagggcatactgtttaggatgcattcctaaaatattaatggcaaaagatagccagcctatggcaaagctaattggaaaaaatattttataaaggatgagacttctggataccatatgggaagggctctggttcaggaaaatgtttttaaaaaactgtcattgaagagaccatagaatcaaacaaaataatttaatctgtatgtaaaagaagttggtaccaccataatttttcttatacatgtcatataaggatctactctgtgtattgtcattgagggcagatataatttcttagttcatcattaactctctgaagtatttcacacagtagtttgtacaccttctaagtactcaatacaatgcttgagttcaattattggaaagtggtctcttggagaaaaaagaatcatagtgcaaaaccaattattttacatggacttttcctctatatctaagccctaataagaggcagctgtctgatatacatacatacatacatacatatatatatatatatatatatatatatatatatatatatatatacacacacacacacacatatatgtatatatatatttggagtaggggatggagtcttgctctgtcacccaggctggagtgcaagtggtgtgatctcagctcactgcaacctctgcctcctgggttcaagcgattctcctgcctcagcctctccagtagctgggattacaggcgcctgtcaccatgcccagctaattttttaaaatatttttagtagagacagagtttcatcaagttggccaggctgctcttgaactcctgacctcaggtgatccacctgccttggcctcccaaagtgctgggattataggcatgagccaccgcaccctgccaactgtctgacttatcttaaaaggctaaggacctggtttgtttgtcaaattttgaaaatagatgcctcagttcataagatttccatattgtgtggcaggcgcctgtaatcccagctactcaggaggctgaggcaagagaatcacttgaacccgggagacagaggttgcagtgagctgagatcacgccactgcactccagcctgggcgacatagtgagactctgacaaaaaaaaaaaaaaatccatatgtgaaaattcttagaagcttcctatacaatttcagctgaagattcagccaacagttcattctgagactgtgttccatggaaaaagtaaagcccaggcatggaagtgggaatggaaagaaagattctaagcctacaaatactcaaacatcaagaagaaataaaaataagtcatcacttcgacttcatgtgctaacatcactgaggttataaattcccaggaatattttattgcgggagcaagactgcactgctgcctttcagcttgcaaattccagtgagaaacgtctttctctctgctctcaactaactctacagaacgctgtcctctcatttcttcaggctgcagttctagagtagggactcagagtgccactgttggccagtctggaaacagagataaatgagccaatccccagacattccggcttggtggcttttctaatttcatggaatgcaaatccaagagcagacccacaacattcctattatggctcctagttctacaaattataagcaggaacggaacggatttacaggcaatgagttcagctccttcttggctggagattctataatccaagaagagtttgaaaaggggcttatttgggctggagcagcagcaactctaactgtggaaaaggtggggaatggtgctggactgacagtctgggtagaaccaaggcgactactgcctcctttcctgctatttctatcctgctgggcattctctatgatgcagatccgttattcagtcctagaggagctggccaagagtttggtggtgggaaaccttgccaaggatctgggactcagtgtcgaggacatgcccacttgaaagcttcgggttaatgctgaggaataatacttcattctaagtggggaaagtggagacttacttgtgaatgactgaatggatcaggagcagatacgccccccaattatagcttgggccataacgctttgaaatagttgaaggccaggcatggtggctcacacctgtaatcccagcactttgggaggccgaggcgagcagattacgaggtcaggagttcgagaccagcctgaccaacatagtgaaaccctgtctctactaaaaatacaaaaattactgggcatggtggtgcaggcctataatcctagctactcggggggccgaggcaggagaatcgcttgaacccgagaggcaatcgcaccactgcactccagcctgggtgacagagcaaggcgccatctcaaaaaaaatgaacaaacggtagttgaaaattctttaaatgtttttcacattaatatggagattcaggatatgaagaatcatgcaccacggttcagcaggaatgttattaagttacgtatctctgagtttacccagctggaacaagatttgcaacagaacctgcagaagatcctgatgttgagagaaattccttacaaaattatcaccttagcagcaactctatatttctctttgaagtaaaagtgaccaacagtggaaagacatatgttgatcctgtgttagagaagctgcttgactaggaaaagcagagctcccatcccttagtgctagcagccttagacggccccccaacaaagcagcatcactcaactcctgatcctattggttgaagccaatgacaaccctgtgttcatctaggatgtgtacagcgtcggccttcaggaagatgtgcatccgggcactcctgtgctgagagtgagggccaccaaccaggactagagtgtcaaggcagagatcacatatggcttcacaacccagagtacccatatctagtttggccttgatcaaatagtggagaaatgaaaactttaagtacattggacttttaaagatttttaatttccatggttttggtagcaagtgacagagagggactcattgtccagtgtacagttgagaccgaatttctagaagataatgacaatatcctagaggcgatttttacttctaattccacaatgattcccaaagattctgcaccttggacagtaatcactgtccaggatttaaatcacaagatctttaaatcacaagatctggattcgggagaaaacgaggtcacatgtctgatataagaaaatgcaccttgagaaaaatcttcctccaataattaactacatgcttgtaacaaatggggccgtggaccaggaacagacccaaggtataacatcagcatcactgccactgacagaggcaaaccaaccctctcgtccagcccaagcatcaccctactcattggcgatgccaacgacaatgctctggttttctaccaggcctcctacgtcgtccacgtggccaagaacaatcttcccaaagcctccatagtgtgcaagtagacacctccaacctagacttgggacccaacagccaagttccctattccatcgtggccagtgacctggagccacaggcgctgtgattctaggtgtccttgagcgcacagtgcgccttcgaccaagagcagccgcgagccttcaagctcacgctgcaggcccgcgaccaggactagctcgcgctcggcgtcaacgtgagcctgcgcgtgttggtggacgacctgaatgacaacgcaccgcgggtgctgtaccccagctctggagcgcaatggcttcgcgctcttggatatggtgctgcacgccgcggagcctggctacctggtcaccaaggtggtggctgtagacgcagatgtgagacacaatgcgtggctgtcctaccacgtgctgcaggccagcaagcccaggctcttcagcctggaatgcgcaccgacgaggtgctgacagctcgcacgatgggccacaggaaagcgactcgccagcgcctactggtcgcggtgcactgcggtggacagccgctcctctcgctaccgccacgtcaccaccactaccgcccctcgtcgccgacagcctgcaggagactctgccagacctcagcgatcactctgcaaagctacagcctgaatccaaaattaatttatatctggtgattgccttagctttaatttcctttttattcttcctgattgcattgtttgtgctggttttaaagtgccgaagaccccaaaatgatcctgtctgagtctttcccacggatgtctatcccgcgctaagccccaggtttctgggtaactgtagctctatgatgccatattcctaccaggtgtgtgcttctcctacgaatccagggctgagtgaacttcttttttgaatccctacccctcaggactcaatagcagtttcactgcagaaagccccttggggaaggggatgattgtgattattctaattgcttgggcagaatccactctccaaggtgaaaaattcttgatgaaactaagttcagtcacaagcaggttttcttctagcattaaatattttcagagatctcagtaaaaagcatttctagcagcaagaccaaaggcctaagatgagaaatatttggcatggtgagcttgagggacagtagtcaggcagacaagagtatcagacatgccagagcatttggggcctgtaggtaaggagcatgttttgattatatatatttgtatgtgtttgattatattttataattttactttgatattcaaattgtactgatccaaaaataagggagggacaaatcttggccattgtagtatgagagatgtaaatttacaactcagaatccctgcttatcacttctccttcagcacacaactgtttcattttctatttaagaaacttcctctcactgcaaaaagacattctggctgataaagttagcctataatttcagtaaatctaagaatatgactaatggaagttgccagacctaaactttgaaaattattgttccactgaagagcgtcttatgactgagtgttccagtctccttctcaagctgaaccttgcttttcaaaccagattaagaacactatcataagttatactgcattttatttccctacccatgtccactgcatcattctctatagtacaaagagcttgtctcgccaggcgcatctataatcttagcactttggggcgccaaggcgggtggatcacttgagcccaggagtttgagaccagcctggacagcatggcaaaaacccatctctacaaaaaaaaaaaacaaaaattaacaaggtttagtggtccatgcctgtggtctcagctacttgggaggctgaggtgtgaggatcacctgagtctggggagattgaagctgcagtgagctgtggttgcgctcctgtactccagtctgggtgacagaattagaccctgtcccaaaacaaacaaacaaataaagagcttctctccttatgacttatttaaagcttgggaaattgttccaattcaaatgctttaaatggacttgagctaaaacagaatgtggtatatgaaatgttcttataatcaggtgattgtaaaaattgatccagataatgttagcatagcattttactgaactagtagtttacaaacacttcaaaaattatagaataacatttgcatataaaattcctcatacatttccctatcagtgaattggaagcttacaatatacaatattaccaaaaagacaaaaaaaatgaaaaggaaacagttacctttggaaaacataattaggtaaaatgggtaatatggaaagtctgaaaactgaaaaaattactgataagtcaagagaaaaggaatattagtaggaaaattcataaaagtgtgtctgactactcacagcaggtttccttattggtatgtattctgtggtccatctaagctatgttaattttattttaaatgctacctgggtattggcttctaaaaggaattcagtaaatcagataatttggcatcttcaatctagattctgatgctcacctgaaaagtctgctaaggattggaaaccaagaaaagtgaagtatctcaacagatatgtgtcacttgtgtgtactggattttttttttttttttttttttttttttttttttttgagatggagtttcactcttgttgcccaggctggagtgcaatggcatgctctcggctcactgcaacctccgcctcccaggttcaagtgattctcctgcctcagcctccctagtagctaggattacaggcatgtgccaccacgcccagctaattttgtatttttagtagagacggggtttctccatgttggtcaggctagtcttgaactcccaacctcaggtgatcttccctccttggcctcccaaagtgctgggattacaggcatgagtcactgcgcccggtcgcgtactggatttatattgtgtaatactttgctctagcagtatagtaggtgagacagtgactgtgtctagtgagcaaaaggcacttatttgacacttttgactcttcctttctacttaccttatttaaaattgatttttgcatgtggcatgatgcaccagttcattgaggtaggggttgaagttatttcccatttttttcaataccatttattaaaaatattttcctctttctgttgaatttgcttggtgcctttgttgaaagtcatttcactgatatatgtagttctatttctatattcttgatcatgtttcatttgtctattcttttactaatagcacactgtctcaattattgtagctttatagtaagtcttgctacaaagtcttactacaggacaaagcttgtaggatttttgaatgggatggcattgcatctatacctttatcagggaaagagggaaggagggaggaggatcatcttaacaatattgacacttcaaatccatgaacatggtatatatttccatttaattaggtctttaatttctctcagctatgttgtatagttttcagtgtagagaggtcatgtatatttctcattaaattgtccctacatatttgatgttttctaatgttattgtaaatagtatttttaaaattgtatcttctaattgttcatttctagtttacagaaaaatgaaaaactatgtttttatgtattctatatgcttttgaaaagtaagaggtgcaaagtgctctattcttacactatattgtgtgagaatataagtcgaaaccactctgcataagttcaggcttccattctcttcagtttgtaggttgagagaacccatccagaaacagtaaacattggtgtctgcccaagtctggtcctgggtggttcattcattcatttacataacaaatatttattaactgtctgctatatgcaaggcactgacctatggactaaggatgcagcaatgaacaaggcatatatgattcctgagttaatgggccctattctaatacatgatattttacaggtctgataaaagccaacaaggagaaatacaaaagcactaagagaaagcttatagtagggaagcttcgcctaatctgaaggtcaaggaaggctttctttttttcggaaagtgatatttagagagatgaatagattaataggatgagtagaagttatctaggtaacaaggaaagtaaaaaagaaattgtcaggcagaggaaatagcatgtgtaaagatctttttaaaaaataaaaggtgtgactcaagcaatttaaaagggctagggaggctagaaacagaaaataaatagatgaaactaataaggcagggagagccttgtaaatcacacttaaaattctggattttgttctaaatacccttgtacttaggagctattaaaatattttaaacaaggcagtgacaagatatttgaattattaagcttactctggctgctatatggagaattgatttatgagggttataaatagaaataggaagataagataggagactatggcaatattcctggtaagaaatggaagaagagctggcttggattaaaggggaggcagtggatgtagaaataaatggatgaattatagatatatttaggaaatgggttcaataagacttaataatggaataggtggaatataaatttcatgagggcagggggtgttttgtttattattatattcctaggtgtctgaaaatattgttgtgttgcctggcaagtggtagatcttcagtgaaatattattaactgaataaatacaatggataaatggggagcagggattaagagtgattcctgggtttccacattaaggaactggatggacaaagctaccatttgatgagaatggaagactaaagaatgatagatttaagagaaatcgagttgagttccagccatgttcatttgaaggatctgagaaacagtgcagatattcagtgtgtgattagacatatggtcatcattcttttttttttttgagatggagtctcgctctgtcacccaggctggagtgcagtggccctatctctgctcactgcaatctctgcctcccaggttcaagtgattcttctgcctcagcctcctgagtagctgggactacaggcgtgcaccaccacgcctggctaatttttgtatttttagtacaagacagcatttcaccatattggccaggctggtctcgaactctgatctgcccgcctcggcctcccaaagtgtggggattacaggcgtgagccaccgcgcccagccggttaccattcttttactctgagttcttccattgtgatcatctagtcagatgggtagatccttataaggctgagcataataagcttcctgatagctctacactggtatgttttggggttcatggctgagctacttttgtgttttatttatcttcctgatctctttttcactgtaagaaacatccagcacccagggaaatttgctgtctaattcatactccactcttcagactagtcctagtgttcagttttgttttgttttttttctgtgtctggaattctattaaaatgtgtcaggctgttttaatttttgttgtttaattttctttcacatgattatatgtgctccatggatttttttgtttgtttgttttttgtttttgtttttgtttaagcggggtcttgctcttgtcgcgcaggctggagtgcaatggcttgatctcggctcactgcaacctccgcctcccgggttcaagtgattcttctgtctcagcctcccaagtagctgggactacaggcacatgccaccacacccggctaatttttgtatttttagtagagacgggtttcatcatattggtcaggctggtctcaaactcctgaccctggtgatctgcccacctcggcctcccaaagtgctgggattacaggcgtgagccaccgcacccggaggaaatttttaacctcagtttttcttcaccatctgtaaaactgcatagaaggaatgtttaggataaaagatgcataacaatcataacaaaattgttgggttttaatgttatgagtacacttggaggattctatgtccacacataccttaaacatcctatagagtccttagcattttaaagttgaaaccaacagtatgaatgatggtagaattttcccccccaggaagttagaactgttccatatcttgatagagggatgggttataaggatgtacacattttccaaaactcattgaacttaagagtcttgcatgtgactgtatataaattatactttaattgaaaataaatttaagaaaataaaattggctgggcgtggtggctcacgcctgtaatcccagtgctttgggaggccgaggtgggtgaatcatctgaggtcaggagttcgagaccagcctggccaacatggtgaaactctgtctccactaaaaatacaaaaattagctgggcatggtggcggacacctataatcccagctactcgggaggctgaggcatgagaatcgcttgaacccaggaggtggaggttgcagtgagccaagatcatgccattgctctccagcctgggcaacatgaacgaaatgccatcttaaaaaaaaaaaattaaaagaaaagaaaattagcctcccccaccctcactatacctcagactcacccctgaaagatcactactattcatccctggttatgtacacttacaaacattttctgtgtgtatgcgaatgtatgtgtggggttttctttgcacaacaggatcattttacagtatatatactgttgtgcaacttgctctttccacttaatatctcaaggaatcttttctttgaatctttatagccatgtacctcaatcttagtagttttctttattttatttttgaataggaaatacatttacatggttttaaaaatcaaaacaatatactatgtatatattgagaagtctgacttccatccctatcctactcctattccacccttgcttcctcctgtcccctgtaggtaaacattttataactttattaagcatcctgtcagcatttcttatgcaaatatgtacatatatttttatttccccattttttttacaaaaagataaaatactatacaccactttatatcttcctttcttcacattatatcctttaaaaatatttccatattggccgggcgcggtggctcacgcctgtaatcgcagcactttgggaggccgaggcgggaggatcacgaggtcaggagatcgagaccatcctggctaacacggtgaaaccccgtctgtactaaaaatacaaaaaaaaaaattagccaggcgtgatggcgggcgcctgtagtcccagctactctggaggctgaggcaggagaatggcgtgaacctgggaggcggagcttgcagtgagccgagatcgtgccactgcactccagcctgggcgacagagcaagactgcaactcaaaaaaacaaacaaacaaacaaaaaagaacttccatattaatatatagaaagctgttttttttaacagttgcttagcattcctttggattattaaccagtctcataaatgagcgctattgaatagccctgtacctacatcagtttttacatatgcagtatatctttgggatgaattcccagaaatggaattgaaattgctgggtcaaagaggaaataggtgtaattttcttaggtattttcacaagaagtgttaattctaactttctgttttgaaatgatttcaaattttcaaaggagttgcaagaattgtacaaagaactgtatctccttcacccggatgcaccgggtgaattatatgtattatataattgtatctgtaggccaggtgcagtggctcactcctgtaatcccagcactttgggaggctgaggcaggtggattacttgaggccaggagttcaagaccagcctggccaacatgataaaactccatctctactaaaaatacaaaaattagccaggcctggtaccccatgcctaagggtgaggcatgagaaatgcttgaacctgggaggcggaggttgcagtgagccgagatcgcaccactgcactccagcctgggcgacagagcaagactctgtctcaaaaaaaaaaaaaaaaaaagtaaaaaagttttttaaaaagatgtatctatatatacatatttacatacacacccaagtgtgtatgtatatatgtttgtgtgtatgtacacaaacacattatttttatatgatatgatttttttatgacatgattatttttatgacatttgagagtaagttgtagaaattatgtttctttattcctaaatacctcattgtgtatttcctaacaaggacattcttttatataattaaattttaataataaaaatcagaaaatttaacatcaatgcaatataattatttagcctatagtccatatttaaattctaccataccttatagtatattttactatacctcatagtaattttttttagtccaaaatatcacacattgcatttagttgccatgtctcttttttttttttttttttgagacagggtctcactctttcgcccaggctggaatgcagtggtatgatcttggctcactgcaacctccgcctcccaggttcaaatgattctcctgccttagcctcctgagtagctgggactacaggcatgtgccaccacactcccaccacacccagctaatttttgtatttttagtagagacaaggtttcactatgttggccaggctagtcttgaactcctgacctcaagtgatctgcccacctcagctaagtgctgggattacaggcgtgagccaccatgtgtggcctagttgccatgtctctttaatctactttaatctgaaacagttcctcagccttgtttgtttatatgaaactgacatttgtaaagactagaagccatttgtcttgtataatgcctttaatttatatttgttttatgtttcctcgtgattttatatatagagtttgtttgtttgtttgtctgtttgtttgttttgagatggagtctcattcttgtcacccaggctggaatgcagtggcgcagtctcggctcactgcaacttctgcctcccaggttcaagcaattctcctgcctcagcctcctgagtagctgggattacagatgcctgccaccatgcctggctaatttttgtacttttagtagaaacggggttttgccatgttgcccaggatggtctccaactcctgacctcaggtgatccgcccgccttggcctcccaaagtgccgggattacaggcatgagccaccgtgcccggacctcatgattgtatttatttatttatttaatattattattattatttttttttttttgagatggggtcttgctctgtcacccaggctggtgtgcagtggtgcgatatcggctcactgcaaccgctgcctcccagattcaagcaattctcctacctcagcctcccaagtagctgggattacaggcatgtgccaccacacccggctaatttttttgtattttttttagtagagacgaggtttcaccatattggccaggctggtctcgaactcctgaccttgtgatccacccaccttgacctcccaaagtgttgggattacaggcgtgagccaccacacccagccttatgattgtatttagactagacatttttttggtagtatattatttagccattgctgtgtaacaaattatcccaaaacttagtggcttaaaagaagcatttattatctcataaattttgtggatcaggactgggtatagctttgctgagtgcctctgcctcaaagtcttacaaggcagcaattaaagtgtcacctaaggctattgtcttatctgaagggtcaacagaggatggatccgcttctaatctctctcacatagttaatggcaaaattaagttccttgtggattgttagactaagggttccagttccttgctggttgttagcttgaggtctacctcagttccttgccatgtggacctccatagggcaaccagcttctgttagagcaagtaaaggagagtgccagagagggcaaatgtgatgaaagccacaatctttttataaacctaattttgaaagtgacatacaaggctaggcatggtggctcaaacctgtaattccagcactctgagaggccaaggagggtggactgcttgagcccaggagttcaagaccagcctgggtaacatgacaaaaccctgcctctactaaaaatacaaaaattagctggtctggtggtgcatgcctatagtcccagctactcaggaggctgaggccagagaattgcttgaacccaggaggcggaggttacagtgagccgagatcacaccactccactccagcctaggccacagaatgaaaccctgtcaagaaagaaaggaaggaacaagggagggagggaggaaggaagggaggtagggaggcagggaaagaccgagaaagtgacataccatcatttttgctgtagtttgttcattagaagcaaaatcacttggtccagcccacactctggggagatgattttctaactccatttgtaataacttattctacttttattagttggcattatacagtaagaaagagctttcttttctcttcttatttattcatatatggctcatgtgttttttccaatgagttatattctattactaacattttttattttgacctcaaattgttttagatgttaccaataagaacctcttcaagctggttcttgtgtccttttgccataactctctcattttcttgaaccctttcttactttctgatataagaaaatattagagactcatactttccttgttccagttctgagatgaaccatttatccaaaagccttgcttcattttagtagggaatagtatttagaaactaagatctgggtgtgaggtatgctcactgctaatgggctgtcactgtttctaggccttgtcagcagacggagctaggaaaaacacacataaacacacccatatttatatttgtacacacactccctcaaaatcgtgagttcatattgatacctccagttctggttcttcctagccttccccctttccatctttgtatttttattttccaacagtaagaaccctggctcccagtgctatgaatatatttactcatttgctccatccactgcactccagcctaggccacagaatgaaaccctgtcaagaaagaaaggaaggaatgagggagggagggagagaggaagagagagaaggaagaaggaagggagggagggaaaactgagaaagtaacataccatcatttttgctgtagtttgttcataagaagcaaaatcacttggtccagcccacactctggggagatgattttctaactccatttgtaataatttattccacttttattagttggcattatacagtaagaaagagctgctgaagatttgcttgcaattggttgtctttaaactgagggtatattgtcaaagtactgtgctgaaaagttacctgtagtatagttatgtgattcattaaaataaagtttgtttctattatgtgcagttttagagttttgccacactctggttgattagtatattttctgttgcttttttgttttgttttgttttgttttgtttttgagatagggtctcgctatgtcacccaggctggagtccagtggtacaatcacagctcactgcagcctcaacctcgtgcacttaagcgatcctcccacctcagcctcccaaatagctggggctgcaagtgcacaccaccatgactggctaattttttaattatttatttatttatttatttattttagagatggggtctcactatgtttccccaggctgaccctgaactcctggggtcaagtgatcctcctgccttagcctccaagtgctggtattacaggcataagccaccacacctagcctagtattcttttttgaatatgtaaaacattaacataaagtcaaaactattaaaaaaaggtgtactcagaaaattgtcattcctcccctataccttctgcctcattcacaccacactctgtagataatcgatttcattagtttgtggtttatcctcactgtgtttctttttgcaaaacgcaaaaacaaaacctatacatatttatattttcttatgtcctcttctttcttacacaaaaggtaacacactatgtaggtagtcctggctttgaacagtttcactataaaaatatttgttactacagcttaaataacataagtctcctaaaaataattcaaattttagttaccatggtatattaactttgagtagttccataaaggacaaacttggctgctagcccttcagtccacagagcactttgaaaataacagatgagcaaaataatgtggccaatcacatgacttctttcaaagtatgtcagtgatcagtcactgtgtgcctataatttagttcatgcacagacagcaaagcatgtagttgtgttgccttccagtgataaacccacataacattttagaaaaatgtattaagaattggccagcaaagataaaagtgcagcaaagaaacaaaagtgataatgttttcagtgaaatttgaattgaacataaatggagttatagaagaaatagctgaccatgggaatgttcacactgctactttcaagaatctctagaagggcagctaaaggagcttagtgaaggtgaatttattgacatgaatgagaaaagtaattgtgatgaaaaggatgaagatgtcccagagaaagtaatgccagcaaaaacttcacattaaaggaactctcagatatttcaaagcattgaaacctccaagaataaataaaatgttggaagttgatccaaacttagaaaggagtatggcaacttgtcaagatgaagaaaaggtgcttattcctttttatttatttatttagagacagagtttcactcttgttgcccaggctggagtgcaatggcatgatctcagctcaccgcaacctccacctcctggattcaggcagttctcctgcctcagcctcccaagtagctgagattacaggcatgtgccaccacgcccggctaattttgtatttttagtagagacagggtttctccatgttggtcaggctggtctcgaacccccaacctcaggtgatctgcccacctcggcctcccaaaacactgggattacaggcatgagccaccatgctccacctgcttattccatattatatgttataggatgaaaagaggccaaactaatcttgacatgttttttacaaggaaataatcctccatggttctaatttttttttttttttttttttttttttttgagacagagtcgcgctctgtcacccaggctggagtgcagtggcacgatcttggctcactgctagcaccgcctcccgggttcacgccattctcctgcctcagcctcccgagtagctgggactacaggcgccggccaccacgcctggctaattttttaaaaaatatttttagtagagacggggtttcaccgtgttagccaggatggtctcgatctcctgacctcgtgatccgcccgcctcggcctcccaaagtgctgggattacaggcttgagccactgcgcccggtgggtctaatgttttaaattacactgtgttaaataaatattagtttgttggttttttttttagtttttttatttctctacaaatttacaaccaataagagtttttaatgctttgacaaaaaatgttaaaggtcatagtacaatcgcatttcttcccattgattattaacatcactttacatagtttcatcttgcattagcaattttgtgtgtgtgtttgtggttttaaggagcggagagtttaataggcaagaaggaagggagaagacagaaggaaggagctcccccttacagagacagagggagcggggctccaaaagaggaggtccccatctaccgcggataccagccaggtatatatgcagaggctggtggaggtgatgtctgatttgcatagggctcaggggattggtttgaccaggcatatcattcacgtagcccgagaaaaagctggccctcccaccccagccttttaatatgcaaacgtagggcgccatggatgttctaaacacgtggagatatgtggggggcagccatgtggccaggaacttgtggggcaagggcaagaaggctgtgggaatcgccaagttgaatggacctagtttctaatggcctgcatttgcatatcaaaggttgctggcctggctcctagagccggggctttaaaagaaacttttccggagatgctttaaaaaatgaaaacttcccaaggaccccttttcctgtctatctgcataaaataatttcttttattatttatttatttatttatttatttatttatttatttatttatttatttattttgagacggagtctcgctctgtcgcccaggctggagtgcagtggcgcgatctcagctcactgcaagctccgcctctcgggttcatgccattctcctgcctcagcctcccgagtagctgggactacaggcgcccaccaccacgtccggctaattttttgtattttcagtagagacgggatttcaccgtgttagccaggatggtctccatctcctgacctcctgatccgcccgcctcggcctcctaaagtgctgggattacagaataatttcttaataactcctaccacattcctccctgtggcgatatcaaactaactgctgttaggaggctttgggcgaccattgcttctggctacttcctgctgaaaaggggcgtctaatggagaacagcagctagggctcctcctggggttgatctaagggtcctcggaagaatggcgtccatgtgtggttcagtttacagcaccgtttggagtttgattgcttctaggcgagaagaaacaattcaagttatagtattgagtatacagagtccaaatatcaatacaagacatataagcaagagagtgcttaataaaggggttaaccaattccataaagaagactggaagtaattaaagagggattgtagccactcggggctgaagcccacattttccctgagcctgtcaataattttgatttgatttttaagtccctgtagatttgcctcttctttactacaggtgttaatcccaaagaagcatgtttcatttaaaaatgcattactggccaggcgtggtggctcgcgcctgtaatcccagcactttgggaggctgaggcgggagcatcatgaggtcaggagtttgagaccagcctggcctacatggcaaaaccccatctctactaaaaatacaaaaaattagccatcgtggtagtgggcgcctgtaatcccagctaattgggaggctgaggcaggagaatcgcttgaacccgggaggcagaggttgcagtgagccgagatcgcaccactgcactccagcctgggcaacagagcaaaactccatctcaaaacaaaacaaacaaacaaacaaacaaaaactgcattactaaatccaataaaaagtcctagtagactcagtgatagtaaaactttcatgcttcctttttgccagtaactattatccctgctataaggatactaattaagcaaaatacgacagcaatggaaactctgtccaatatttcagttagaaggtgctaccatggataaccctattgcaaatagtagagtgaggaaagcagttcccacaaatgtggtgtggtaggtaatttccatctaaaattttacttgccaacatatagaattcccctctgtgggcctacgaagttccttggttttattttcccaaacaaagaaacctccgggttacaggtaccttacttactttcattacctggcacaatttgcaaaataattgcccagaactagcatattgattcacattttcacattacccatccctttttcccccccaccaagctgcagaagatcaccacttgattcacaggaataagcagggccagggttagtctaaaatgtaggcaaaaagcttaaaaacaattaatgagactagggtttaatgacaaatgtatgataagctttggagcaaaatttttctctccagtcctcatttttggtaaaaactaattatgaatgaactttaatcttatacttggcctgattatttgcatgaagtgcagcaagaatggttatttctacataggacttttggattggctttgatgaaacactgttccacaaggaatttcagattagacttttaaagctgagcccagacatgggtttgtatcctctaatacctgtgagttgggttatcctctcctcttgaggtcccaagataaactcagagcttccagacctgttagaaagtgacattcttcactgaccacaggttaggaaccctgtgtggggactgtgtagacaaggtgtgaggccagttctccccaaggggcttttattggctctgcatgtcaagcttgattccttaaagggaaacacaccctttcagttaaagccttggcaaaataaccggtttttccaattgtgttctgttgacaaagaaaaatggattcttgctgcactgatgcgaacaactatattgccgtaagttaagagtacttacagatagtctccaaattttagaggaaccaggcagagaaaaatgaacatgctccaaattttgttcacagtagtataccttacttgattattaaaggccataaatagtttaaaataagtttcctttcccagtccatgcaccaaaatgatacggctctgatgagtggaggaacaacagggttcctggtcctcatgctggtttagataaaatgacacagacacatgtggagtggttttaaggagtggagagtttaataagcaagaaggaagggagaagagagaaggaagacgctcccccttgcagagacggagcgggggttccaaagctgaaagaggaggtcccccacattaacaatttttaaaataccgtacaactgcagaaaatgaggactgcctgtacatactgtttgacactttgtttttttttttaacttatcaactttattttgtttgtttgttttggttttgggtttttgtttgtttgtttgttttggagacgagtctcactctgtcagccaggctggagtgcagtggcacaatcccagctcactgcaacctccacctctcgggttcaagcaattctactgcctcagcctcccgagtagctgggattacaggtattcgccaccacatccagctattggttttggtttttgagacagggtcttgctgtgtcacacaggctggagtgcagtggtgtgatctcagctcactgcaacctctgcctcccaggctcaagtgatcctcccacctcagccttccaagtagctgggactacaggcatgcacaccatgcgcagctaattttttctattttttgtggagacggggtctcactatgttgcttaggttggtcacaaattcacagcctcaagcagtcctcctgcctcaccctcccaaagtgctgggattacaggcatgagccaccacatccagccttaccagctatattgaagtataatttatataacataaaatttgccttttaaaattatacagtgcaatgcattttgacaattgtttacatctgtgtaaccaccatgcaatcaaaatatagaacatttctataaccttcaaaagttccctcatgcccctttgcaatcaattcactacttctccagctccaggcaacaactggtctgcttcctgtcactataaattagtgttgcctctttcagaatttcatctaaatggaatcctataacatatactattttgtatccatcttcttttactccaaagttcttgaaattcattcatgttcctgtgtgtatcagcagcgtgttccatttgattgttgagcagtattgcattgtgtggatatatcacaatgtgttcattcattcaactgttggtggacatttgagttgtgtccagtttagtgctattctgaattaaagtgatgtgaacaatcatgtacaagtatttttgtaggcatattttttttatttctcttggataaataccccaaaacagaattgttttgggggtcatatgaaatgggaagtatatgcttaactttataagaagctgccaaactatttttcaaaatggtaatatcactttacattttcatgagcaatgcataaagcgttccgcttgctacattttctcaccaatgcttcctattgtcaattttttaaattttagcaattctagtgggtgtgtgatactatctcattgaagtttcaactgtttttccctgttgactagagacactgagcaacttttcatgtgttgtctatttgtatatcttcttgaagcattcgttcatctttaactgagctgaacgccttcttaaaattgagctatgggagttttaaaatatatccttgtagctgggcgtgatggcaggtgcctgtaatcccagctactcaggaggctgagacaggagaatcgcttgaacccaggaggcggaggttgcagtgagccgagactgcaccactgcactccagcctgggcaacagagtgagacttcatctaaaaaataataattatacatgtaattatatatgatttttatatatgtaatatatatattcttgatgtgagctctttgtcacatacatattttgtggatattttatcccagactatgacttgtcttttcattttcttagttgtgtcttttgaagagcagaagatgtaattttgataaagcccaatttattttttcttttatagtttgtatttcttatgtcctattcaaaaactccttgcctactgaaaacttatgatgattttctcctatattttcttttagaagttttatagttttaccatttataatttggtctatgaatccttttgagttgatgtttatgtatggtgtatggtgtgaggtaacaatgaagattcatatttttttccaaaggaatatccaattgtctctttggaaaaatatgctgagaaggctatcttttccccaccaaataatcttagcaccttaatcaaaaatcatttggccatggacatatgtaggtgtgggttttttctgggctctctgtgttagatggatagatagacagatacagatatataactgtgtttacacatatgtaactgtaaacacagttatatatctatatatccaccaacagttgaatgagaataaactattgttataagcatatatacacattgtatatatatgtgtacatatacatattgcatatgtatgtatacatatatacacacaaagtatatatatgtatgtatacatatatacacacttaaagtaatggcctccagttcgatccaagttgctgcaaaggacattatttcatgccttttcgtggctgagtaatattccatggtgtatatatatatatgtgtgtgtgtatatatatgtattatgtatatatatatgtgtgtgtgtgtgtgtgtgtgtatatatatatatgtgtatatatatataccacattttctttatccactcattagtcgatggggacttaggttggtttcacatttttgcaattgtgaattgtgctgctataaacatatgtgtccaagtgtctttttcatataattacttattttcctttgggtagatacccaatagtgggattgctggattgaatggtagatctgttttttgctctttagagaatctccatactgttttccatagaggttgtactaatttatattcccagcagcaatgtgtaagtgttctcttttccccacatccacaccaacatctattgttttttgactttttaataatggccattcttgcaggaccaaggtggtagctcgttgtggttttaatttgcattttcctgatgattagcgatgttgagcattttttcatatgtttgtgggccatttgtataccttcttttgagaaatggctatttgtgtcctttgcctactttttaatgggattgtgttttatttttcttggtgatttgttagttccttgtagattctggatactagtcctttgtcagatgtgtactttgcaaagataatattttggatgttatatttccattataatttagttcaaagtattttctaatacaccttgcaatttcttctttgacccatggattattttaaagtttgttattttgtttgtttattttgagacagagtttcactttttttgcccaggctggagtgcagtggcacaatcccggctcccagattcaagcgattctcctgcctcagcctcccaagtagctgggattacaggtgcccaccaccacacccagctaatttttttttcttttttttttgagacagagttttgctcttgttgcccaggctggagtgcaatggcacgatctcggctcactgcaacctctgcctcctgggttccagcaattctcctgcctcaacctcctgagtagctgggattccaggcatatgccaccacgccaggctaattttgtatttttaatagagacggggtttcttcatgttggtcaggcgggtcttgaactcccgacctcaggtgatctgcccgccttggcctcccaaaatgctgggattacaggcatgagccactgcacccagtccaattttttgtatttttagtagagatggggtttcatcatgttggccaggctggtcttgaactcctgacctcaggtgatccgcctgcctcggcctcccaaagtgcagggattacaggtatgagccaccatgaccagcctaaagtgtattgtttagtcaccaaatatgtaagtattacccaaatatatttgtcactgatttctaatttaattgtattgtgatccaaaaatatacattgtatagtttctattcttttaaattcgttaacatttcttttatggcacagaatatggtctatcttggtgagtgttgcttacacacaactgtgtaactgaaaactgtgtattctgcttctcgtggttgttgtatcctataattgtcaactagatcaagttagtaagagtgttgttcagtgatcttttcttcttcagtgtttactgtatttgctaatcccatccagtgaagtttccatttcatatattgtatttttcacttttagaagttccatttgactctttcatttccatcctcaattatcttcatatttttctttaaatttttgagcacatttataatggaggttttaaagtccttgtctgctaattttgtcacctctgtaattcctatgatgattttcttcctggcttggggtcataatttgttgcttatttgcatgtctaataatgtttttattggacagcagacattgtaaatgttatatttttgagtgtttggattttgtctttctttaagaactattgcagtttgttttggaaggctattatgttttttgcagatcaggttgatcttttcaaggcttgtttttaagctttgttaggacaggtctgtagtaacttttgccttgggctaatttagacctaccacttaattctgacttttttgattaatctgagtgttcagcagggtctctttattatggctaaatgaaattcaaacattttccagccctatgtgaccatcaagaattcagctaatagctccctggcagttcttcgcccagctgcagaaaagtgtcagtgcactctatgtatgctcagattattatttagccaaagacttggggatccatattaatattcctggagttctttgtgtagctccattctctttagtactctatcccataaattctggctgcctcaatctcctaatctccccaaactctaatatctattcctcaactcagcaaaaccatggtgttattcttggatttcccctttcctgccccacagtctgaaagttgtctccaggcaaaaaaaatggagatcctagtttgcggatcctcatttccttctccttttttttttttttttttttttttttttgagatggagtctcgctctgtcacccaggctggagtgacgtggcgtgatctcggcttactagaaactccggctcccgggttcatgccattctcctgcctcagcctcccgagtagctgggactacaggtgcctgccaccatgcccggctaattttttgtattttgtttagtagagacggggtttcaccgtgttagccaggatggtctggatgacctcgtgatctgctcacctcggcctccaaaagtgctgggattacaggcatgagccaccgcgcccggcctgcttctcttctcttatgggttagaatcctgcactgtcttttgaacaaatgtctaaaagcttttatcacacattttgatccacttcccagttgttatagtggtatatctggtttcacatgactgaaaggaaaagttttcaccttgctttttgtactaataatatatcctggaaatcattctatataaatttatagaaatcttcatttttaaaatagcttcataaaactccattgtaaaaaccaggtgcagtggctcatgcttgtaatcccacactttgggaggccaaggcgggtggatcacctgaggtcaggagttcaaggccagcctggccaacatggtgaaactccgtctctactaaaaatacaaaaattagctgggtgtggtggtgggcgcctgtagtcccagctacttggaaggctgaggcaggagaattgcttgatttcaggaggcggagattgcagtgagctgagattgcgccactgcactccagcctgggctacagagcgagactccgtctaaaaaaaaaaaaaagcaaaaaaaaaaactccattgtatgtgcacatatcattatctgttcaacccatctatgacttgtcatttaggtagtttccatccaatatttttgcaatataaaaaatgctaatgaagaacctgagatatatatatatctatatatatagatatatatgtttgttgttgttgttgttatttttgaagtatgtacgtataataaattcctaatagtgtgattgctgcatcataaggtaaaggcatatgtagttttgttaaatatagctattccccatcttgcattcctacaaatagatgagaatgtccattgtcccatagtctcctttgcagagtatattgtcaagctttttaattgttgccaacctgatgggtaaaaagatatctccaaataattttaattaaaatttctcttattatgaatgaggttaaatagtttttcatatgtttaaaagccagtttatatctttttgtttttttagagacaggaatcttgttctgttgcccaggccaaattgcagtgatgcagtcatagctcactgtagcctcgcactcctgggctcaagcaatcctcctaccttagcctcccaagtagctaggactacagatggatgccaccatgtccagctaatttttttatttttttgtagagatgtgaggtctcactatgttgcccaggcttgtcttgaactactggcttcaagtgatcctcccacctcagcctcccaaagtgctaagattacagccatgaaccaccacaaatgaccctatatatttttttgaattgtctgttcatgtcttattttcatttttctagtagttttttttttaagtgttttagcctaaatttgtaaaaagtttaggggatatatgaagggactctaaatgtttatgaagaaatttaattaaaagataaaaataaaaatataagctttatttttcaacatgagctccatcaagttcaaggcacttttgtaagcaatgatactagccatttagttcacccctaaagaactgagagtcctgggaatttagccatgtcaatgcagtattttttatattggttactgaagaaaaaatgggtgccctttaaagttgtaagattaggaacaaaaacaagtcagaagaagccaaatcagcactgaaaggtgggcacttaatgattacccaagaaaactctcaccaaattgcccttgcttcatgagaggaatgagcgggagcattgtcgtggtcaggaaggattctggggaagttttcccaggcattttttctgctgaagctttggtaactttctcaaaacactctcataataatcagatcttatcactctttggccctccaggaagtcaaccagcaaaatgctttgaacatcccaaaaaagcgcttgccatgacatttgctcttgaccagtctgcttttgcattggtcaaatgccaccacttccacctcttgtgctttgttttcaggatcagactggtaaagtcatgtttcatctcttgttacagtttttttttttttaagaaacccttcaggatcttgatcacatttgtttaaaatttcaactgaggctgggcccagtggctcatgcctgtaatcccagcactttgggaggccgaggcgggcaaatcacgaggtcaggatttcgagtccatcctggctaacatggtgaaaccccatctctactaaaaatacaaaaaattagccgggcatggtggcaggcacctgtagtcccagctactcgggagggtgaggcaggagaacggcatgaacccaggagacggagcttgcagtgagctgatatcatgccactgcactccagcctgggcaacagagtgagactccagctcaaaaaaaaaatcaagtgaaaactctggtcttaaactgcagctgatctattttatttttattttttttcagacacagccttgctctgttacccaggctggagtgcagtggcaccatcatggctcaatgcagccttggcctcgtgagctcaagcaatcttcccacctcaggctcccaagtagctgggactacaggcacatgctaccatgcctggataatttttttgcagctaatctagatgtaatggttttggcacccatctaatggaaagtttgctcaactttaatttttcagtcagaattgtgtaagctgaaccgagatgtctatggtgttggctattgtttctgctgttaattgtaggtcttctttaattagagcacagacaagatcattttttttcctcccaaattgatgtagatggtcttttgctgtgggcttcatcttcaacattgtctcatcccttcttaaaacaagctagctacttgtaaactgccgttttctttggagcattgtctccataaacttttcacaaaacatcagtgatttcaccgttcttccactcaagcttcatcataaatttgatgtctgttcttgtttccattttagcagaattcatgttactctgataggggctcttttcaaactgttatcttattcttcttagtgcctcaaactagatcctattcagacatggtataacaagttagtatgggtttattttggtgcaagaaatattttgaaatccacacatttttttcataatatgcattttccatgaagtttttgaaaactccttgtattaggaatattagtcctttgtccagtaaacagactgcaaatattttctcacagctcatcatttaccttttggcatttttttgcaatgcaatttttttccctttgtttttgttttttgtgtaatgaatcaatgttttcttttttttttttttttagaccaagtctcactctgtcacacaggctggagtacaatggtgcaatctcagctcactgcaacctctgcctcccaggttcaagtgattctcatctctcagcctcccaagtagctgggattacaggcacatgccaccatgcctggctaatttttgtatttttagtagagatggggtttcaccatgttggccaggctggtctcgaactcttgacctcaagtgatccactcacctcggcctcccacagtgctgggattagagacgtaagccactgcccccggccaaatcaacgttttcttatattgcatttaggttttaagtcatagttagaaagcctttccccacacctaggttatagaaacattcattacttttttcttccagtgctagtacttgcatggtttttggtttccacatttagatccctgatctaattggagtttattcttttgtgtgctgagatatggatctgattatatcttttttcccaaatggctatccagttgtcccaatgccatttattaagcacttcatctttgtcccagtgatttgagatagcatctttatcatgtaccaaacttctatagtgccagaagatttttattttttttagacagggtctggctctgttgcccaggctggagtgtagtggcacaatcccagctcgctgcaacctccgcctcacatgctcaagtgcccgcacctcagcctctcaagtagctgggactacaggcacatgccaccacaccaggctgatttttatatttttttgtagaatgagatttcaccatgttgcccaggctggtctcaaactcctgagctcaagaaatccgcccacctcagcctcccaaaatgctaggattacaagcatgagccaccacacccggctgccagaaaattttaatgatcagaaaaccacaattctttcttcctctgttatatgttgaagtaaaatacttcatttagaaaactaagccgggcacagtggctcacacctgtaatcccagcactttgggaggttgaggcaggcagatcacctgaggttaggagtttgagaccagcctggccaacatggtgaaaccctgtctctgctaaaaatagaaaaatttgctgggcatggtggcgggtgcctgtaattccagctacttgggaggatgaggtaggagaattgcctgaacctgggaggcagaggttgtggtgagccgagaccacgccattgcaccccagcctgggcaacaagagcaacggtaaactccatctcaaaaaaaaaaaaaaaaaaagaaagaaaaaagaaataactcagccatacaaggctacccatttggtgagaactaataataagttagatagcaaggtaatagcaaaatgtgggtgcaaaattaaagcaagttatttctgaggagaatgtaggtctcatggaagattttcatgtggacaaatttagtaaattttttgcaggtagtttcctgacatatttaacatttgtgatatagtaaacaataagaaggtactaaaggctgggcgcggtggctcacgcctgtaatcccagcactttgggaggccgaggtgggcggatcacaaggtcaggagatcaagaccatcctggctaacacggtgaaaccccgtctctactaaaaatataaaaagttagctgggcgtggtggcgggtgcctgtagtcccagctactcgggaggctgaggcaggagaatggcgtgaacccgggaggcggaacttgcagtgagccaagatcaagccactgcactccagcctgggcaacagagcgagactccatctcaaaaataataataataataataaggtactaatatgatccagactagaagagaatagcactaaaatgggagatggggtaaacctgtggttttttttaccttaggcttttgacttccaaaattattgtttttgctgggtgcggtgggtcactcctgtaatcccagcactttgggaggccaaggtgggaggattgcttgagcctaggagtttgagaccattctaggcaacaaagcaagaacctgtctctaaaaaaatttaaaaattagccagaaatggtggcacatgtctgtagtcccagctacttgggaggctgaggcaagaggattgcttgagccttttgaagttgaggcttcagtgagccatgatcaccccactgcactccagcttgggcaacagagcaagaccccatctcaaaaaataaaacaaaatagactgggcacgatggctcacgcctgtaatcccaccactttgggaggctgaggtggatggatcatgaggtaaagagatcgagaccatcctggccaacatggtgaaaccccgtttctactaaaaatataaaacttagctgggcgtggtggtgcacacctgtagtctcagctactcgggaggctgaggcaggagaatcgcttgaacccgggaggtggaggttgcagtgagccaagattgtgccactgcactccagcctggcgacagagtgagactctgtctctaaataaataaataaataaaacaaaataagtaaaataaaataaatgtttgtagttccaaaatattttgatgacataatttcttcttgttctaataaaactacatatgcattggtcctatgacctagtaatcacactattaggaatttatcataaatacacacctcaaaaattacaaaaatacatatataccagcttatttattacagcgttatttgtaattgcaaaaacattgtagatagaatggaggtcacataaaacttattcttaagattcagaccgggtgcaatggctcacgcctgtaatctcggcactttgggaagccgaggcaggcagaccacccgaggtcaggagtttgagaccagcctggccagcatggtgaaaccccatctgtaccaaaaatacaaaaattagctggtcgtcgtggcacgcctgtaatcccagctactcgggatgctgaggcgcgagaactgtttgaaccccggaggcagagactgtagtgatctgagatcatgccactacattccagtctgagcaacagagcaagacttcgtctcaaaaaaaaagatcatagatcatcttatcaaatcaaagtatgcaaaatattcaagtaaacttcagataaatatgaaggctaaaccattcagcttcttcaccaaacccttgaatgtcccacctgtctaaatggagatacatgtttgtttgatttattggttaactgtttttattccatttttcctcaaatgatcccataatttgaccttaggaagctgttcaaatagacacattaggttgaatggaaagactactcgatgatatttaggattttaagaggattttatgtattttttccttgtgtgcaataatttaatagcatcttgaataggattttctgatattactaaccctctgggaataatattaggtaattagacagttagctaatattaaaatatgtatcaggtaatatttattgagagtttcctctgtgccaagcaggatcaacttcataggcaggcgacctgtgcggggacacagggcttcatgcttagataggcccccttgctttgaaggcccctaccctttggttagggctctgctgttaccatcttgaaattcttaataatttttattttatttttttgagtcagggtcttgctctgtcgccctggctggagtgcagtggactcactacagtcttgaattcctgggctcaagcaatcctcccacttcagccttctgagtagttaggacgacaaacacacgccaccatgctcagataagttttttgtttgtttgtttttttgtttttgtttttgttttttgtagagatgggactgtccctatgttgctcaggctggtctcaaattcctggcctcaagtgatcctcccacctcagcctcccaaagtgctgggactacaggcatgagccactgtgcctggtcaatcatttttattaacaagcccaagccctcttttttttttttttttttttgagacagggtctccctctgttgtccaggctagagtgcagtggtgcgatcttaccttcactgcaacctctgcctcctgggttcaagtgattctcctggctcagcctccctagtagctggaattacaggcacccacccccatgcctggcaatttttttgtatttttagtagagatggggtttcaccatgttggcaaggctggtctcaaactcctgacctcaagtgatccacccaactcggcctcccaaagtgctgggattacaggtatgatccactgcgcccggcctccaagccccctatttttattttgcactgaccctacaagttacgtagctaggcttagttatgtttttagcaaggaaagtgtataatctcatgtaccttttgaaagattactcaggtctctgcatgtgaaatggaatttagggaatgcaagagagggagtaaaaataacagcgaggaagctatgatagcatttaaggttgctttgactcaggggtagcagtagatagggtaagtaattgatagtttcaaaatatattttgggagtagtaagcattggtatggattagtaatatactggatgtggggatgcagaaaaaaatattaaaaattacttctgaaattctggctggaatagaagtgccacttaccaggtaaggaaggttggagacataacatatttgagggtgtggtcaaaagatgagtttgacattatgctatgtcatataaaagacatataaaagactacctattttataattcctttttaataaaatattcagaaaaagcaaaactgtggttgcctgaggctgaagctaggaagattgactacagacaagcatgagggaaattttgggggtgatgagagttttctaaaactggattgtggggttggttgcattactgtataaatttattaaaaatccctgcatcgtataggggcactatattgtatgtagaaagctgtgaaaagattttaaaaatgattgacatgtctgtggttatatcaatgagtactattattattcccattttatacataaagaaaataaaagagaagttaaaaataaaagtttcatggttacatagctactaggtgtaatatccagtattggaatttgaatctttttgacactaagaccttactctcgatcatataatacattcactttctattttaaagttatattatagccgggcacagtggctcacacctgtaatcccagcactttgggaagccgaggcaggcagatcacgaggttgggagatcgagaccatcctggctaacacggtgaaaccccgtctccactaaaaatagaaaaaattagccaggcgtggtggcacgcacctgtatcccagctactagggaggctgaggcaggagaatcgcttgaacccagaaggcagagcttgcagtgagacgagatcgtgccactgcactccagcctgggtgacagagtgagacaccatctcaagaaaaaaaaaattatattataaatgctgcatctcattggtcagaagctctcttgaaattataaaacaaagaagaaaaaagataaagactgggaaattgtgttgaatcagtatataaatcctgtatactggtccttccatttcccctagaaataagtgatacaggccaggcgctgtggctcacacctgtaatcccagcactttgggaggcggaggctggcagatcacctgaggttgggagttcaagatcagcctgaccaacatggagaaacccccgtctctactaaaaatagaaaattagctgggcatggtggcacatgcctgtattcccagctactcgggaggctgaggcaggagaattgcttgaacccaagaggaggaggttgtggtgagccaagattatgccattgcactccagcctggggaacaagagtgaaactcaaaaaaaaaaaaaaaaagaaagaaaaagaaaaagaaagaaggaaggaaggaaggaaagaaagaaagaagtgatacaacaagttacagcatctttgtttattatccactgtgagttgtattaccacactttacttggctctttggcaaactatattatctcttcagatcactagggctaggaaggcccactggtaacttgaaggagtaaatgtatcttctaaaaaatgcttacttccagggagattggatccacacaagtgaatacatatatagtccttagtgtatgctatgattattttactatgtcagtagcataaagattgctatattaataagcattaagtgcctgctgtgctagacagtgaggatgcaagtggccaccaaaatagcatggtccctgccctcctggagcttctttttttcttcttcagtgggggaagcagatactttgcttatgcaaaaataattataaaatttaaagttgtgccaagttcaatggaaaaaatataaggtgttctgagagagcataacaaaggatcctggttttaactggggcctaatggaagacctctattaggaaataacatttaaactaagaccagacagacctgtagaaattagcaaagcaaagggagggaggaaaaagcagctttcctggcaaaggaacaatttgtgtgaaggccctgagacagggaagggctggggttctgaccaccctccaagtggtgcaatggaatatagtgagagagggagaagacatgagaacttggatactatgcaaaggatttggtattttaattcaagagcagtatgatgctactgaggagcagctggacaattgtgtgatccaattaaaattttaggaagatgaacctcgctattgtggagaatgcatacacaagggttctgttggttcatgaagaggtcttaagaaaactatgagctgggtgcagtagctcaggcctgtagtcccatctacttagaagtctgaggcgggaggatcccttgagcccaaggagctggaagttacagtgagctatgattattccactgtactccagcctggatgacagagcgagatcctgcctcagaaacaaaaaccaaaaaacaaacaacaacaaaaacaacaacaacgaaaatctcagaaaactacaggccttattatcaagaaaatgacaggccttattattgagaaaactacttacatttttaaaagctgattttcaaaaaccagattgtgaattaagtgatgctgaataggggaaaaaaagactgataaaccagtgtatctctgaataacccactagatcagtgcttgtcaaactttaatgtgttttcaaatcaccctgatgttttgttaaaatgtaagtcatgtctcagtaggtctagaggagggcatttctgcatttctaacaagctccccggtgatgcctagaccattggtcctcacactttgagtagcaagtgattgggctatactctttattctaaattctaaatgtattctatcttctaatgcctatcagccctcttgctggtctggctaattatcaaacttgagcatttaaaactgggggttttcagagattaattgaagtgttaaagacatggaaatataggtcacatatggcttttcatctcttccggaaatatcctatatatccttacttcttttctacctacctaacctatgtgcctaccccttcacttatgttcaaggttctattatacttcaaaaggactctatgcaatcaaagtgatgtccaagacaaatatacagaaatagtatgaggctctaacactttacatctaatggagtggtttgcatcattaattgaggcttactctgtgccaggcactttacctgccttcttcatttaataggataggagcaggaactcttagaggttcatttcttgttcaaggatatacatctcatctctggcttatatcacagtggactcttttattcactatcctaatcattataattttgtttggtgacaacaattctaaatgcagaaaagttaaggctctttattctgtgactaaaggctttgtattttctaaagatttgtggagctttgctgccattatttcaataattttataaagatcctaggtggtaaataggcctggctttttttctttttgaaatcttctccgtcttcttcttcattagcagtgcaacttcttgtggcatatggtacccaagatcttgggaaaaggattgatcaagtaaagggaaacgatagagagagtgtgctctacaactgagatcatgctccttgtgaaagacagggtagggaaatttcttattgctccctggttcttaagaaatgagagctaacaatgacatccagttttaaaagaaataaaatctgaattgtacttttaaattttataagccagagttaaaccaatagattgtaactcctgctaatttgatagtagctccagataatgaggaagtgacagggaatgctaatttcatttggtaagagataaaactgaaattattaatgtctccacggaaatgctaaatgcctccttacaagtagggtccggctaattgtctgtcttccaacaagccagatttgttggtgtttttccagacaatgttgtgtagttttcggtttggttcgatcccctttcttgtgatcaaagaaagtgattcaaatgtttaatgagtcttgatttggattggagacttgcagaacggctagcctcacagccccaaggctggctttccctaaggtaggtttcctatgcaccgatactggcaaggcgctttggctggaaactctggaaggaagccaaaggaaagtgaagttcctggcgctagcgcgtgtcctgctcagagagcccggcgctagctcattcttcgtgcagttattggctgggactctgtgtgccgctgtcggccaatgaagacgctggagatcgggcccctgcccgtcccctttctgcgccccgggatgaggcagagactgaacagccggcgagcaaatcaacggcatccagaaagccatgtcggactcggcgcccagcgcccaagcgctaacccgctgaaagtttctcagcgaaatctcagggacgatctggaccccgctgagaggaactgcttttgagtgagatggtcccagaggcctggaggagcggactggtaagcaccgggagggtagtgggagttttgcttctgcttggtgccttgaacaaggcttccacggtcattcactatgagatcccggaggaaagagagaagggtttcgctgtgggcaacgtggtcgcgaaccttggtttggatctcggtagcctctcagcccgcaggttccgggtggtgtctggagctagccgaagattctttgaggtgaaccgggagaccggagagatgtttgtgaacgaccgtctggatcgagaggagctgtgtgggacactgccctcttgcactgtaactctggagttggtagtggagaacccgctggagctgttcagcgtggaagtggtgatccaggacatcaacgacaacaatcctgctttccctacccaggaaatgaaattggagattagcgaggccgtggctccggggacgcgctttccgctcgagagcgcgcacgatcccgatgtgggaagcaactctttacaaacctatgagctgagccgaaatgaatactttgcgcttcgcgtgcagacgcgggaggacagcaccaagtacgcggagctggtgttggagcgcgccctggaccgagaacgggagcctagtctccagttagtgctgacggcgttggacggagggaccccagctctctccgccagcctgcctattcacatcaaggtgctggacgcgaatgacaatgcgcctgtcttcaaccagtccttgtaccgggcgcgcgtcctggaggatgcaccctccggcacgcgcgtggtacaagtccttgcaacggatctggatgaaggccccaacggtgaaattatttactccttcggcagccacaaccgcgccggcgtgcggcaactattcgccttagaccttgtaaccgggatgctgacaatcaagggtcggctggacttcgaggacaccaaactccatgagatttacatccaggccaaagacaagggcgccaatcccgaaggagcacattgcaaagtgttggtggaggttgtggatgtgaatgacaacgccccggagatcacagtcacctccgtgtacagcccagtacccgaggatgcccctctggggactgtcatcgctttgctcagtgtgactgacctggatgctggcgagaacgggctggtgacctgcgaagttccaccgggtctccctttcagccttacttcttccctcaagaattacttcactttgaaaaccagtgcagacctggatcgggagactgtgccagaatacaacctcagcatcaccgcccgagacgccggaaccccttccctctcagcccttacaatagtgcgtgttcaagtgtccgacatcaatgacaaccctccacaatcttctcaatcttcctacgacgtttacattgaagaaaacaacctccccggggctccaatactaaacctaagtgtctgggaccccgacgccccgcagaatgctcggctttctttctttctcttggagcaaggagctgaaaccgggctagtgggtcgctatttcacaataaatcgtgacaatggcatagtgtcatccttagtgcccctagactatgaggatcggcgggaatttgaattaacagctcatatcagcgatgggggcaccccggtcctagccaccaacatcagcgtgaacatatttgtcactgatcgcaatgacaatgccccccaggtcctatatcctcggccaggtgggagctcggtggagatgctgcctcgaggtacctcagctggccacctagtgtcacgggtggtaggctgggacgcggatgcagggcacaatgcctggctctcctacagtctcttgggatcccctaaccagagcctttttgccatagggctgcacactggtcaaatcagtactgcccgtccagtccaagacacagattcacccaggcagactctcacggtcttgatcaaagacaatggggagccttcgctctccaccactgctaccctcactgtgtcagtaaccgaggactctcctgaagcccgagccgagttcccctctggctctgccccccgggagcagaaaaaaaatctcaccttttatctacttctttctctaatcctggtttctgtggggtttgtggtcacagtgttcggagtaatcatattcaaagtttacaagtggaagcagtctagagacctataccgagccccggtgagctcactgtaccgaacaccagggccctccttgcacgcggacgccgtgcggggaggcctgatgtcgccgcacctttaccatcaggtgtatctcaccacggactcccgccgcagcgacccgctgctgaagaaacctggtgcagccagtccactggccagccgccagaacacgctgcggagctgtgatccggtgttctataggcaggtgttgggtgcagagagcgcccctcccggacaggtaaggtttagcaagtcatgcttgaccctgttagtgcttttttattcctacatcatattgaggaaggaatggagctgtttttttagtgatgaagatgttttcctggtgatgcattcacactttcaactggcccttcctagatcaaagttagtgcctttgtgagatggtggcctgccagagtgtggtttgtggtcccatttcagggggaagatacttgactcatctgtggacctaattcacatcctcagcactcttttgctatcacaactaaccaatcttgctaagggatggttaagctaaaacacaagatctcagcgatcagagtttagcttggtatcatttacattaggaataagctgctggatacctctaaccagtggcagcttctaggaatacaaaaactacctcattcctccacctttcaagtgattgtgacatttgtattaaaactaatagctttttgataattttcctttgtttatacagatcgtgtacctcattctcagataattttttatgaatgaaatgaaattccaggcatcctttaaattttatttcaagcattctactggaaatgatgtgcaccctgcttacaaaatatttttaccttataacagtaatgcatgtttgctagaaaattcagaaaatacagaaaagtatttaaaaaattaaaactataatctccaaacccaaagataaccatttttaattataaaagtaataatttatttcaaaaataaatctaggcaacccaagaaaacataaagtagccagactcagtggtgtgcacctgtagttcttgctgctcagtgcctgaggtgggaggattgcttgagcccaggagttctgggctgtggtgcactatgctgatcaattgatcaatccactgtctgcactaagttcagcatgaatacagtgacctcttgggagggcaggaccatcaggttgcctaaagaggggtgaactggcccaggttggaagtggagaaggtcaaaactgctgtgctatccagtagtgggatgacatctgtgaatagccactgcactccagcctaggcaatatagggaaaccatgtctctttaacaataacaacaacaacaacaacaatcccagaaactacaaaaggagagtctttttggtgcctccagtgttagtccctgtccttccagccttatttttcttaagtatatgcacaatgtgaaaggtagataaattcatatccttagacaggtaaagcattcattaattcagggtggtatgcaaggatactatccaaggcatggtatccatgcaaggtgactgcaaggcctttgccctggagagaaccctatacatactctcaactgtaggagaaacactgttattttgttactcagtgcatcattgctatcaactcttggatttggcagttagtcaaatgaggttctaccatttaccaactaggagtctgtggccaagttactcaatctcctttctaagcctcttcctcatatgcaaaaagggaataataagtgttttataagattcatgcatgatataatgtatgcaaagtgtttagcatggtgcctggcatatcataactgttaaacaattattagccagctcctagcattttgggaggctgaggcaggcggattgcttgaggccagcagttcaagaccagcctgagcgacatagtgagatcctgtctctacaaaaaaaaaaaaaaatgtgttttcattagctgggtgtgttggcatgcacctgtggtaccagctacttgggaggctgaagtgggagaattgcttgagcctgggaggttgaagctacagtcagctgtgattgcaccactacacttcaaccatggcaatagagtgagaccctgtctcaaaaaaaaaaattatcagctattactataattatttttattagttcctcactcacctaaaatctcaaacacaccttagaaatacacatatgagaacaaccaaaaatgacaaagtagaagcacatatgaaaaggctaagaaagcatgaaagccagcaagaaataactgccgctcttctggtcagcctggaaagcaactggcattttccctagaacaatgttttcaaacttggttgcacattaaaatcacctagagaccttttaaaaattctgaaacccaggccacaccccgacaaatgaaagcacagtctctgggggtgggacataggcatcattttttgaaggtccccacttgatcctaatgtgcagacaaatttgaaaaccacagctttgggaggctgaggtgggtggatcataagatcaggagtttgagaccagcctggccaatatggtgaaaccccgtctctactaaaaatgcaaacattagctgggcatggtggcgcatacctgtagtcccagctactctagaggctgaggcggaagcatcagtgagggagaatcagtgaacccaggatgtggaagtttcagtgagcccagatcacaccactgcactccagcctgggcgacagagcgagactccacctcaaaaacaaaaagaaagaaagaaaaaagaaaagcagtactctggaacctaccaatccatcatttagcatatttgtgaagtaaagtgttattctggtatttgcagaaccagaatccagctttattgggccaggcccaatttttttaaaaaacatggtaaggtctcccagccttaaagtattacatagcatagctctaaaagatcactgtaggaagacataaaatggtatttcagtcatctaagggaaaaaccttcctaaagcactagcccctggacaactattatttaaacatctacagctgttcaatagatattgggttctttttggagggatgtgacaaaattcttgtataattagattgtgatgatgattgtatcagtttagtacatgtaaatacactgaaaaccattggattatacactttaaatatgtgatttgcatggtatgtgaattatgtctcagtaaaaatctagagatggggctgggctcagtggctcacgcctgtaatcccagtacttagggaggctgaggccagcggatcacctgaggccaggagttcaagaccggcctggccaacatggtgaaacttcatctctactaataatacaaaaatcaggccgggcctggtggctcacgcctgtaatcccagcactttgggaggcggaggcgggcggatcacgaggtcaggagtccaagaccagcctggccaacatggtgaaaccccgtctctactaaaaatacaaaaattcaccaggcgtggtggctgaggcaggagaatcgcttgatggtggaggttgcagtgagccgagatcgcgccactgcactccagcctgggtgaaagagcgaaactccatctcaaaaaaaaaaaaaaaaaaaaaatcagccagatgtggtggcaggtgcctgtagtcacagctacttgggaggttgaagcaggagaatcgctttatctcaggaagcagaggttgcagtgagccaagatcatgctgttgcattccagcctgggcaacaagaacaaaactcactccatctcaaaaaaaaaaaaaaaatatctagagatgggagaatcatatggctggcataaaaaggtcaagtcaaagatatgtaagattaaggctttacgatgctccagttctagtaaaacagaccaggtacttgttttggtgtgaaattgccaatataagtatagtactgtacatattagttgtttagcttaggtaagtcttttaatctctttaaactccagtttcctcatctataaaataaagagaatatctactttgcaaacttgttgtgagagtgaaaagtaatgcatataaagtccctgtatggagcaagtactcaataactatttgttgaactaaaaatgataatactgatattcaccatttattagcatccctatgtgccagacactgtaaacaattaaaagttatcattctggtacccagagtacagtatgagacagacatgcaaaaaaaaaaaaaaaaaaagataatggagatctgcatagcataagatgcagtgggaccaaacgggaaaaaacacctaaatgagcctggagaaaggaagaaatgatagaggtggtgatgcttgagctatgatctaaaggttgagtagtagcttgtcagacagtaaaggggaaaggacagggcagggaggggccattgcaagaaattccatgcagagggattatggtatttcattatcactgaaccttaaactgtgtgtgtggccgggtacggtggctcatgcctgtaatcctagcactttgggaggccaaggtgggcagatcacttgaggtcaggagtttgaaaccagcctggccaacatggtgaaacctcatctctattaaaaatacaaaaaattagccaggtgtggttgtgggtgcctgtaattccagctacttgagcagctacttgagaggtcgaggcaggagaattgcttgaacccgggaggcagaggttgcaatgagctggtgtcaggccactgcactccagcatgggcaacagagagagactccatctcaaaaaaaaagtgtgcgtgtaaaacagacagtctttgtaggagatgaggtgaagcaagtaggcaggagttagatcctgagttacctttgggccaagccaaggagtttttattttattccatatagatgacagtcactgcagaaatttgaactgatatgcatatatcatgaggtttttttgttttagaaatattattctgtcagtcataagtgaagggactggggacattgggactggaggcaaagagatcttatctctttgcaatagtttgaaagctattgcaatatttgaagagaagattgataaatgcttgaaccagcacagtggcagtacagatggagggagctgactacaataaaatcatcaggacttgttgattgacatgatataggaagtgagggacagggatgagtcaaggctgatccccctagatcctgactaaggaagctgggtggttgacagtgccattcacagagacagtgaattctggcataaacacctaataggtcaggctggtttacacctccatcattcccatgggagaaggtatagaggggtgtgtgtttgtgtgtgtgtgtgtgtgtgtaaaagaacacagaaagccagattcctctttttgacaccagaatattggttcccaccatagtcaaaaggatattcctgaggatcgaggcttggaaaaatattggggaaggataagaactccagttgttgctgctttttttggcagccagtgtaacctaggtaaggacttggttgaattaagaaatttcatgtccagatcaggatggatttttctatttctctgagctctggtgtgtttcccactcagattgcaggtcgtaggtacctacggtgtgaattgtgttgtgtttctgtgcttgtgcaagggagtagctaggttgctgggaggtctggatgagggtgggggtggggtgagatcaagtctccagctccaagaggtcccctggggctaagtgaaaagcttgctcttttgaaatggtcttcgttggtaattaacaaaagatcaagaataccttggtgtcagataaagggaatttgtaggcacaatgctgttggtagctgatctcaatcattcaaggaagctattaaatctatgaacattagcattctgccaggtaaagagatctggtccttagcacctcccagacacactgattctttactgttttgaaacatctccctctcctggcttcctccaccccgcttccatactgtccttgaaatcaatgaatggtaatttagtgtatctagtgtatcactagcaaatgtctgaataagaaaggtttggtttccgctgtgtctcctgttacaatgagaacatgtactgcataaatttaattggctacgttaatgtgtaagccttttctgcaaagagatggatccgtttctgaatattctgcagaagggcagagttttgagtatatggcagtggttctaattagcagttgctccaatacaatcagactgagacggaagctactcatttagaatactggttgatgacaacactggcttgaacaaagtgaccactctccaatggctactctccctctcagtgggccgcaggttgctagggctcaggctgtggctgttttccccgccgaaaaggggcggggtcagtcggtgtgttaggaaaaaaaatgtatatatatatatatgttgtctgcctccccacagagataacaacccgtggaaaaacatgccgttgagcgggaggaaggcgaaaagataggctgggttttttggggggtgggggagcgtggaggatagggtgggctttttcccctccaatgctgcgacgcattaaccctgctgctgttgggacgttctctgctcagcctattggctgagcccgggagccgctgtctgccaatcgggtggtgaaaggcagacaaatctaccccgccaccagcaaaaacggcgcgtaacccttgcggcgccggccgaaccgcgccagagctggcgcggggaaagggagataggtgtctccagctgctgtggctgtttggggcgggtcggcttcatccgcgtctcaggagcaagtagagaattagcgggcggcagcaatgctccgcaaggtgagaagctggacagaaatctggcggtgggctacccttttgttcctcttttaccacctgggttacgtttgtgggcagatccgctacccggtcccagaggagtcacaggaagggacttttgtagggaatgtcgctcaagatttcctgctggatacggacagtctgtcagctcgcaggctgcaggtcgctggagaggtgaaccaaagacacttccgtgtggatttggacagcggagccctgctcatcaagaacccaatcgaccgagaggcactgtgtgggctcagtgccagctgcatcgtgcccctggagtttgtcaccgaaggtcctttggaaatgtaccgagcagaggtagagatcgtagatgtgaatgatcacgccccccgttttccgcggcagcagctggacttggaaattggggaggcagctcctccaggacagcgtttcccgttggaaaaggctcaggatgcagatgtggggagcaattcgattagcagctataggctgagctccaatgaacactttgcactggatgtgaagaagcgcagcgacggcagcctggtcccagagctgctcctggagaagcctttggatcgagagaagcaatcggactaccgcctggtgctgactgctgtcgatggagggaacccgccgagatctggcaccgcagagctccgggtatccgtgctggacgtaaacgacaacgccccagccttccagcaatccagctacaggattagtgtgttggagagcgcaccagcgggcatggtgctcatccagctcaatgcctcagacccggacctgggtcccagtggtaacgtcaccttttatttcagtggtcatacccctgatcgtgtaagaaacctctttagcctgcaccccactactggaaagcttactcttttggggcccctagactttgagagtgagaattactatgaatttgatgtgcgggctcgcgatgggggttctccagccatggagcaacattgcagccttcgagtggatctgctggacgtaaatgacaatgccccttacatcacagtgacctcagagcttggaaccctccccgagagtgcagaacctggcactgtggtggcacttatcagtgtgcaggatccagactcagggtcaaacggagatgtgagcctccgcattcctgaccacttgccatttgccctcaagtctgccttcaggaaccagttctccctggtgactgctggacccttggatcgagaggccaaatctagctatgacatcatggtcactgcttctgatgctgggaaccctcctctcagtacccacagaactattttcctcaatatttcagatgtgaatgataatccaccctctttctttcagaggtcacatgaggtgtttgttcctgagaacaatcgcccaggggacctgctttgctcccttgcagcctctgacccagactctggcttgaatgcgcttatctcctactcactcctggagcccaggaatcgagatgtatcagcttcctctttcatctctctgaacccccagacaggagctgttcatgctactcgatcctttgactatgagcaaacccagacactgcagtttgaggtgcaggcccgggatcggggcaacccaccccttagcagcactgtaacagttcgtctatttgtgctggacctcaatgacaatgctccagctgtgctccgtcctcgggcccggcctggttccttatgtccccaagcactgcctccatcagttggtgctggccacctaatcacaaaggtgactgctgtggacttggattcaggttacaatgcttgggtttcctatcagctcctggaggccccagatcccagcctgtttgcagtctctcgatatgctggggaggtgcggacggctgttcctatcccagctgacctcccaccacagaagctggtcattgtggtaaaggatagtggtagtccaccactctctacctctgttactctcttagtgtccttagaggaagacactcatccagttgtcccagatcttcgagaatcttcagctccaagggaaggagaatctcgtctaaccctctacttggctgtgtccctagtggcaatttgctttgtctcctttggctcattcgtggcactactctctaagtgtcttcgtggggcagcctgtggagtcacatgctttcctgctggcacctgtgcctgtctcaccagatctcgaaggagggaggggcttcccccttccaatgggatcctccgaatccagctagggtcagatgaccctatcaagtttgttgatgtgggaggccactctcatggctgtacacccttggcttctgcacccactcggagtgatagcttcatgatggtgaagtcacccagtgcacctatggcaggggagcctgttcgcccaagctgcccaccctctgatcttctctatgggctagaggtgagacctttgcaggctcaacaaatgcttgagggttattctgatccaggcatatggctaggccatgtcctagagagtactggcctctcagtaagtgcccatagtgatgtcaccatttttgtaagaggtaactatgtggtagacgctgtgctttgtaactgtttcgtgaattaaccagagttgtcacagtttagcattgggggcgggtcatgcctatatctgagtaagaaatgaaagtaattggtgatcaagagccaggctgttgtggaagcatgatgatggaatgtgggagcacaggaggctacagtgcacagggtacagtgcaccaggcagtcacttggacaaaggtggctgttttctctactcttcctgaaagaggggatcagattctgaagtaccttaactctaggttaccatttcccaagggattgaggggaaataaaatctttgtctcccagtatctagtacactgtgaagggacctctctatttgaaacatagagacagcagaaagaggagagaactaaaggaatagagaggcacgcatcagagtggtggcatagatcttttggtctgggtcttaggactcatatcaagtccctactggggatttgaactagatgcggtaaattggaaggttggggcgggttggtcatcacctttggaaaaaacagtaagtgaaatcacttatgtcagaaaactggtttacagttggctgattcatagaaacagccaccctgtgcatctttaagttgagttctcctgaatttggtgaaaccatgaaacctagaagccaagccatccatgcttggcctctgaccaccctcctgggtgacctgattcagccccagaaatgttcccctacccaaaaactgtaacactcattccacatttggggtctggggtgtcagaaaagctaagtcccatgtcagctgacattgagatttccgcaaagcattgctggagagtcagggcaagactttacaaggttcttactaatcttttctctcaccttagcagcattcagcaggatgggggagggtgggggaatacatgggctttgcctctcccagaaggacaagattttgctggttcaagcaaagtggtggaagcttctgaagtcatgcaggaagttgctgggacagaacgctgaggagttttgtatcactttgtcttccctgttgagtaccatctgagctgtcaaactttgctgccaagggggctgaatcaacctgcagcacgaagtgagtggggaggtaggaagcttctgtgacacagatttgcagcctgtgttcccaaggtttccaggattgaggaaactccataattggttgagagcacacagactttttggccaatcagactcagagctgaggtgggagatctgctcttccagcccgcctctcctcctccagctccccagctccactcaaattcagctcccctcccccctgcccacccccgccactcggtgactaagaactgctgcaagcaggcaaacctccgagcagtttttaagaggctggaaggagacataagagacttcagctgctgcattccaagccctgggtctaccttggagacaggacagcacagacttactctccacaaagggacttctgggtcatggggcccaagacactcccacagctcgctgggaaatggcaagtgctgtgcatgttgtccttgtgctgctggggctgggtgtctgggcagcttcgttactcagtggtggaggagtctgagccggggacgctggtggggaatgttgctcaggatctgggcttaaagatgacagatctgttgagccggcggctgcaattgggctctgaggagaatgggcgctatttttccctgagcttgatgagtggtgccctggcagtgaatcaaaagattgaccgagaaagcctatgtggagccagcaccagctgcctgctgccagtgcaggtggtgactgaacaccccctggagctaatccgtgtagaggtagagatcctggatctcaatgacaactctcctagctttgccacccctgagcgagagatgcgcatctcagaatcagcagcatctggggcacgattcccactggacagtgcccaggatccggatgtgggcaccaatactgtgagcttttacactctaagccccaacagccacttctctctgaatgtgaagaccctaaaagatgggaagccattcccagagctggtgctagagcagcagctggatcgtgaagcccaggcaagacatcagctggtgcttactgctgtggatggggggaccccagcccgctcagggaccacccttatctctgtcatcgtgctggacatcaatgataatgctccaaccttccaatcctcagttctacgtgtgggaatcccagagaatgcacccattggtactctgctgctccgcctcaatgccactgatccagacgagggcaccaacggccaactagactattcttttggagaccacacatctgaggcagtgcggaacctctttggcctagaccctagcagtggggcaatccatgtgttgggtcccatagactttgaggagtcacgtttctatgaaattcatgcaagagcccgtgaccagggacagcctgccatggagggccactgtgtgattcaagtggatgtgggggatgtcaatgacaatgccccagaggtgctattggcctctttggccaaccctgtcctagagagcacaccagtgggcacagtagtggggttgtttaatgtgcgagaccgggactcaggtagaaatggtgaagtgagccttgatatctctccggacctgccatttcagattaagccttctgagaaccactactcgctgctaaccagccagcctttggaccgggaggccacatcccactatatcatcgagctgctggccagcgatgctggttcaccttccctacacaaacatctcaccatcaggctcaacatttcagatgtcaatgacaatgcaccccgcttcaaccagcagctttacactgcttacatcctagaaaaccggcctccgggctcccttctttgcactgtggctgcctcagatccagacactggggataatgcccgcctcacctactccattgtaggaaatcaggttcagggagccccagcctcctcctttgtgtatgtcaacccagaggatggacggatctttgcccagcgtacctttgactatgaattgctgcagatgctgcagattgtggtgggggttcgagactccggctctcccccattgcatgccaacacatctctgcatgtgtttgtcctagacgagaatgataatgccccagctgtgctgcacccacggccagactgggaacactcagccccccagcgtctccctcgctctgctcctcctggctccttggtcaccaaggtgacagccgtggatgctgatgcaggccacaatgcgtggctctcctactcactgttgccacagtccacagccccaggactgttcctcgtgtctacacacactggtgaggtgcgcacagcccgggccttactggaggatgactctgacacccagcaggtggtggtcctggtgagggacaatggtgacccttcactctcctccacagccacagtgctgctggttctggaggatgaggaccctgaggaaatgcccaaatccagtgacttcctcatacaccctcctgagcgttcagaccttaccctttacctcattgtggctctagcgaccgtcagtctcttatccctagtcaccttcacctttctgtcagcgaagtgccttcagggaaacgcagacggggacgggggtggagggcagtgctgcaggcgccaggactcaccctccccggacttctataagcagtccagccccaacctgcaggtgagctcggacggcacgctcaagtacatggaggtgacgctgcggcccacagactcgcagagccactgctacaggacgtgcttttcaccggcctcggacggcagtgacttcacttttctaagacccctcagcgttcagcagcccacagctctggcgctggagcctgacgccatccggtcccgctctaatacgctgcgggagcggagccaggtgaggggctcggcgccgccccgggcgacccctgggggcggcactggagaagccgcccgtcctcataagggattgaacttgcatccactcctctccggccggcttggtcgctggctgcgctccacccgattctcgggatcattggaccgtttgcgcgaaaccagagtggccgattaagggatggggctccgagcaccgggggtggtggcgactgtgggcgaggggaggtgggaccgacccccacccctacactcaaaaaaggccggggcctccttcgagcttccggtgaatttcgggcgatttccgcgggtgtcgggggtcccgggaggaggcagtcacagatccacccctgcagccagcctcctaggcgccggctccggcacgcttcgccggtctgtagatttcctcttcgatttctccccagctcccagcatctgtgacttcactgttaccctccctatccccgcatcacccaaccgcacctgtctgcgggacttaggtgtgcgcgcggggctcatgcgtgtcctccctgctggccacccccacggcccacacaagttgcacgggctcgccacgccccgccaacacgtgcgcggacgcacgcacgcactcctcgcacgtgggcttacgcgaataccagctttcactgccactcgctcgcggccagattcacaggcctgttccggtccactcgcagctcccctctgccgctccctccgccgggctcaggagtactcgtagctgattgtgcgcgcctgagggtcccagatcgcggccgcccaggaccaggcgaggactccggagcctcctctcacctctcccacctgcgccccgggctgggccgggtcgcctggggggcggcctgagcgaggcgcggggccaggagcgctggagcgactgccgctctaagtgccgggcgggcaggactctacgatccttgggccagaggtccggatggtcccgggactccgtctcaagggtcggcgacccctcaacccagaagcctcgagcaggcggacaggcagagctgcccagtggccgaggcgcggcagggctccgcgttgggcgagtgagtgagcctctataggacagcaggactgggactccagtggcaccagcggccccttcctcccgcaggaagtgaaagcctcgagcgccctggctctcaacccccagagatacaggcttttggcgccgtcgtgatcacaatgtgcccagcgatctagggtcagagatttggaggtgaccaaactatctgacactctaacaagtcctgtctcctctggcagatggaaagctataggctctgccagatgccagggtgcccttatgtgtgaggaaactacaatagtaaaaaacacaagtttctccaactccaggagcttttattcaaaatatatcaatgcctaactctgctcctaggactgtattttgaaacacccccaggtgattttgatagctgattgagagaaacttactatataactcctttgagaacctcatctcatttgctcttcccaccattgctgttggctaggtactaacatgcctctcttataacagcttcacagaggtcaagtgacttgctcaagttcacagagcaagtaagagagattctaacccctgtctaactccagaatgtgtgcttttaatttcttggcacttggaactttaaaagcttgaggacaggagaggggagttgcctctgctgggattttgcttctgctgggatggggcaagggtggggttccttcccttttaggaccttacatgtggggaaagtcttctgtggctcctcatttctgagcagtccccgcagcgcaaacttggccagttatccttttggagattgagttcccccagctccgtttcctcctatcacaatcactgcatttccatgtagattctgctgtgtctaagaatacagtggctgagggctggccatccctgtgcccttctccatggcagccccagaatggtgctggtgactcccgatacacctggaatgctaggtttctgggttctgctcatatcactgccacctgtgagccttgagtgagccactggcagttccggagcttccttctccctggagtaatctgagatactcacactctctgcttctgggagcaagtatgagtattaattaccagcccaccccagaaccagtgaggaggtggctctaggagtgctccatgagagtgtgtgatgggataacacaccccctggaaagaccagaagggactcaggaatgaagtggctggccagagccccacaccttcagctaggtgggagatggctacacatcagccccttgggagccctggagacttagttggccctgcttggaggctgtgggagctggatccctccccgctgcatcccttccatttttctccgtctcagacagagcagccttgttctcttctccttagtcacagaccattgtctggcacggagttctaggggtgagaagtgtcccgggacttggatgccccgcaaaggcccaatctggcatgactcctaaattaataatgtatttagctgtgggaagagattcttgcaagccaagggcccagagaagatgtccctgtgaatgtgtcactgcacaacctggcaccaaaagggttaccaagaacagcagccatcttgctgcagaggatgctttgttcccagctgaggagttgaataaattcattctagggctggtagaattctcattgaaaagcctcctttgccactttagggggctttgtctgcacctcttcccccagttccacagaagatgccttcagtccttgaattttggctcaggagttctgactctgggggcagggaggaaggggccatttctttaggaaaggagtctcagcttgctcactgtggtcagatgaaatgtgatttatctcttggtttctggtacctcagacctctgagacctgaggtgtattttgtctttggagatgagtccacccctgccccctcttagtccgttttcttctctgtgcccactcccctccttctctcccggcccatccctaggggctcgggtgacattctaacttctcacgggtactcagcccctttccctctgttttctccacagcaagccccgcccaacacggactggcgtttctctcaggcccagagacccggcaccagcgggtaggtgactgattctccagcccaccctcttctctgcggcattttctcagggatgacgtgggaggagatgggggagggcccagcatttgctacagatggcttctccctcagtttgagatcccagggaggtcttggtgtgcggggggctggcacacagaccccggaaggaagaggcgactgccctgactgttcaggaagctcaattcacatgcttgccccttccctcctcgccacgaccggcaccttttcctatcccctgagggcactgtggaaccaaaggatggtcttaagctggtctctgggtgaaagcgaggctttctatgcccatgtactgcctaaccccctcccctgagttgagctgggctccattatgacctggggctcaggcagaaaagcatttgaccggaggaggcggtccgcactcagcgcctcctccagagcctccagagccgaggctgactgcagcctggggagagtggaggcagcacagctggaggtggaactgaggaaggactgggcggggcatggagcaggcccccttctccggcccctcctcccactgtcctctgcccctacttgtcctgctctctgtctgtggggtctccgtgtctctgcccctttttcttgagtttccgtctttgccactttctcttacctctcagtccttccctcagtctctatctcgctttgcaatctctgcctctccctctcttctccatctctgtcttagcttccgtcttgattgctgcacctcagcctcagtccctttcatttgtctacttgcattgatctgtgccgcccactgtgcctgccatggcataagtgctcaataaatgtggagtgagtaactacacgggacccttagtctctttctccttctctatctctgcctccctgtccttgtcctggacctcttttctgtttctcctttcaccgtttcctagcgccttgtgttcttctatccccagcctctatgtttctctgtctctcactatttctgctttcctctctgttctttgtctctctttgtctctgtctctgtatatctttctttgtctctgtctctggtctctgtgcctgttgtctttttctgcctctttctctgttactctttctttatctctctttttcttttatcttgtcttttttctctgagcctctgtctctgtctctcatttttttgtgcttgtgggcaagccagcacacacaaccccccacccaccacccaccaacaccccgctctcttccttccctgcccctcacacactgagcctttgatcgcagctctccaccagacaccctcccatccaagcagccccagctgctcatttcaatctggtatgaattcctgctgagacaggaaccccctgcgggctgaaggggagggaaacttcagcagaaagaccttcagttggtctgagcagagtgggataggctctgcgccaggcctcccagttagaagtcaggagcctggaggagtctcagagcccagggagagaagcaggagcttgggccaccttaccctacctcctcaatggttgagtacttgctgtccacatttgccaagttgctacagatgctgagcttccaagagttatctttcccccatcctgcaaccaaccaaacccttgttgccacaaggacccaggagcccttggtgtatggcagagattccagcttctgggcatgcacagtcctgtcacccattttaggaacgcaaagcgcttcttagaaggcccctaaaaagcagcagatcaaaaggcttgggctgcccttgcccttcctttgaccccagctgttgtccttctccctgctggccttgccaaccttctcataagttatccattaagtcattaatgtattcattcgttcatttattcaacaaatatttatcgagcatctactatgagcagggccctgtgctaaacattgggctataggagtgaacaagtagatgtgatcccagaactcataggcttccagaccagcagaggagactgaaaatttgcaacaagtaacacttaaaaaaaaaaaaaaaggctgggcactgtggttcacgcctgtaatcccagcactttgggaggccaaggtgggtagatcacttgaggtcaggggtttgagaccagcctggcagccaacatggtgaaaccccatctcgattaaaaatacaaaaattagccaggcgtggtggcaggcacctgtaatcccagcgacttaggaggctgaggcagaactgcttgaacccggaaggcagaggttgcagtgagctgagatcacgaaaaaaaaataatctagccacaaatcacagtaagttctgagaggcagagaacaatgtgagtgtaatgggggggggaagatcagagaaggcttctaggaggaggtgacattgagaagttctaggccatttatgttccctctacctaccaccaccccaggccatacactggctttgaagcagaattcaccattgaacctggaagccccaccaactgcctctcatgtgtcctctggggtgagcaccttacccctgcctcaactcccattccatcaaatgagaggcttagtggcctggaatacatgtgggagctcttggagatatggaggagaaggtgcggaacctctctctctctcctctctctgcttccttagttaacttgtggaggatgcaacaaaccttttttttttttttttttagacagagtcttgctctgttgcccaagctggagtgcagtggtgcgatcttggctcactgcaacctctgcctgccaggttcaagcgattctcctgcctcagcctcccgagtagctgggacagcaggtgtgcaccaccacacccagctcatttttgtatttttagtagagatgggtttcgccacgttggccaggctggtttcaaactccccgacctcaactgatccacctgcttcagcttcccaaagtgctagaattacaggtgtgatcgcccccggccacaacaaacatttttgattcagcggctccaaagtgaaataagcgttaggatctagtccagtaacttcaacttctctccttcattcattcaacaaatggtcagtgagcactttctgttggccaggcagtgttctcgatgtgggaggcccctgccctcaaggagtttacagtgcactgaaggagacaaatattgaccaaataattacaaaaataaatgtgagactgaaactgtcataagtgctaggtagaattgtatctggtggtgtgggcgtataatagggatttgatttagggagcaggaggacatcctggaaatgaagttgtgctgagatctgaaagacaaatacaaattaaccagctaaagaaaagaaggaagagcattccagatggtcaggcataccagcttcaaagcagggctggtgttgagttcttcagtaaacttggttcaagatcaagccagctctgggtcacactgcctacacagaaggaagagcattccaaatgggaaaagcctatgcaaaagccttgtggtgaggcctcctgggatcaagggaatggcagggagttttctctttgctggcactggagtgaggggatgaagaggagaggttccttttatccagtctaaccctggttccagccttctgttgatgccctgcctcactccctccccaccatcttgcccactgccctccagcctggtctggtcagacacaccagcttcaaagcagggctagtattgagttcttcagtaaacttggttcaagttcaagtcagcactgggtcacactgcctagacagaaggaagaagacctggccaggtgtggtggctcacgcctgtaatcccagcactttgggaggctgaggtgggtggatcacctgaggtcaggagtttgagaccagcctggccaacatgatgaaaccccatctctagtaaaaatacaaaatattagccaggtgtggtggtgcacacctgtagtcccagctactcaggaggctgaggcaggggaatcgcttgaacccaggaggcggaggttgcagtgagctgagatcacaccactgcactccagtctgggtgacagagcgagactccatcaggaaagaaagaaagaaaaagagagagagggagggagggagggaaggaaggaaggaaggaaggaaggaaggaaggaaggaaggaaggaaggaaggaagaaaagaaagaaaaagggagaaaaaatgaagaagacttacattctgaagttcctgcttggcacatgcttctcctccccaccactatcccttctcaggtcatcctttgggtgtctgatcccaatagctgttgtctcaagctctgagcccagcaaaccatttcccccttcttaggctgtaacccaggccctgccctgcagctgtccccagcctctgcacaaagagtctccatttggtccctagactgttctctgatggctccacactaccatccctcctctgagagacagtatccctgctctctctcagtttgggcagtcattcaacaaacaaatagcaacttaatttttttccacttataaaatagtacatgctcattatagaaacatgaaaaatagaaaaaaaattaaaaggaaaaccacccatcattttacaatctagggagaaccaccaccaactacagtttaatatgaaacatttcaaatatgtacaaaagtagagagaatggtgtcatgaacctgtatgataccactatccagcttcaactaatgccttatcttgtttcacctatatccctacccttatcctgtccttggattcttttgaagcaaatctcagacatcatataatttcatcttggtctccaccatctttaacagatgacttttttttttttttttttttttggagacagagtctcactctcttgcccaggctgtggcacaatctcagctcactgcagccttcgcctcccgggttcaagcaattctcatgcttcagcctcctaagtagctaggattacaggtgtgcaccaccacacacagctaatattttgtattttcagtacaaacagggtttcgccatgttggccaggctggtcttgaactcctggcctcaagtgatccaccctcctcggcctcccaaaatgttgggattacaggtgtgagccaccttgcccggccagatgattctttcataaggtccacattttatatttgagtgagtgtctcttaagtatcttaatgctcttttaatgtaaaagacttcccctccatcttccatttttgcaatttatttgttgaatccctgccttttcatatatatctttctaaacttttctttgtgtaatcaaagaacatgcatgagcttcatttttatttttatttatttatttatttatttatttatttatttatttattgatacgtagccttgctctgtcacccaggctggactgcagtggcgcaatctcggctcactgcaagctccgcctcccaggttcacgccatgctcctgcctcagcctccagaatagctgggactacaggcgcccactaccacgcccggctaattattttgtatttttagtagagacggggtttcaccgtgttagccaggatggtctcgatctcctgacctcgtgatccgcccgcctcggcctcccaaagtgctgggattacaggcgtgagccaccgcgcctggccgagcttcattttaaaaaaatctcattcacctaaataagttgttcacaaacttgtcacactttcatgtgacactttattcacatattaagaactgttattcccagtcatacggtacatttcctactagttttttaaaaatagcaactgaggccatactgtccaacagaattatagcttttttcttctttgcagtgtatcatgagaatttccccatgtctttcaaaattcttcccaagtcatttgcagagtaactcctcttatgaatatacatattattttacagaataagtcctcatatgaatatacatattatttttctaatgctaatgggcttttgctacattagaaaacatacacattcatttacaattttttttttttgagacagtctcgctctgtctccaggctggggtgcagtggcgccatctcggctcactgcaagctccacctcctgggttcaagcaattctcctgcctcagcctcctgagtagctgggactacaggcacgcgccaccacgcccagctaatttttgtatttttagtagagacggggtttcaccatgttgaccaggatggtctcaatctcttgacctcgtgatccgcctgcctcagcctccctaagtgctgggattacaggtgggagccaccatccccagcctcatttacattttaacacaattaaattcagggtgttgtcagggtgacttcctagatttctcagttttttgagcatgatgtagggagtattttattatagtccagtctatgggatattcccttatacacacacacacacacacacacacacacacacacacacacacaccccaaactcaatagggcaagaaccatattcatcatctcttaaatcctaggtcctgtcacaggccactgcttggaaaatagttgactaaatgtagtccatttcttccatttttacttttcactattccccaaatcctggaagagtccctcatatctgctgctggggctccaaggcctccaagctgaagcccagtacgttgttgtgcataagatcataggccctggaatcatattaggctggctttcaggttgcaactctaccagttccagctgtgtgactctggtatagtctctcaacctctctgagccctgttttcatctgttggaaaatatagataatcacaacacttatctgcagggtgattccgaggataaaaaagacaaatatattacccagtcagcttagaataggaagctctcagtaaatggttaaaaaagaggtctctctccctctgctcatctcttacccagcttcacataattggcagcccacccacctgtttggccctcaaccttcaaccatttcccaggacgcctccttacactcctgatcatcatggttccaaccccactgttccactcagctttgttccctcaacaccactgctccctgtgacaggtcatcctcctaacctctggcatctggtcccgttgtctccctgacaacccgcatgctctcctccctgcaacccccgccgcttgcctgctctccctactttattcccattagcccccttcacctggggctgagaacacctggccttgaccctgcaccctcagccaggcccacagagctcagtcgggccggaagtaaggaccccagatattcagttgaggaatttaacattaatacaataatatagaatccaccagcagattttcataaatgttctgtgtgttcttttatccttttttttaatccaggattttatcaaggagcatagattgcatttggttgtcacgtctttcctctcctttaatctggagccagctcccagtctttttatttttttaatgacatggatatttttaaagagtccaggccagttgtactttaaaatgtccccgaacctggatttgctggctattctctgatggttagattcagattacacaccttggtaggaatacttcccgcagcatcacactgggactcatctaacgtcggcctgtcccactatcagtgatgccgagtttgttcgtgtggtaaaaacagtgtcccagatctctccattataaaaatatatttttataaagatattttaaaatatttgtgaaaatataagtaatctgtggatgatactttgagataggcagcaacccttcatgcaattttagtattccctgatgatccttgcctgtatctgtttttacatcagtgattacaaagcggtgatgttctgtcattccttctacatgtatttgctggtattcttctgaaaattacctggatgatttcttcagatttaaattcactgtcttttccttggggaagcctggactggctgagctgcctaaccctgactctctgtcttttttttttttttgacagggagtctagctctgttgccaggctggagtgcagtggcaaccttcacctcctgggttcaagcgattctcctgcctcagcctcccaagtagctgggattacaggcgtgtgccaccatgcccggttaattttttttttttaatatctattttagttgagacagggtttcaccatgttggtcagaatggtctcgatctcctgacctcgtggtctgcccgcccctgcctctcttcataccctctggtagcccctgacacagcccatggcaagtatcacaattgcaattactctattgtgtaattatttaaaatcagcctctcagtgcccaccatgagcaccgtaaagatggacagtttctatcatactcacagccacaaccccagcacctggctctgtgtctggtacatagaaattgctcaagaaagaattgttggaggggcgcggtggctcacgcctgtaattccagcactttgggaagcggaggcaggtggatcatgaggtcaggagttcgaaaccaacctggccaatatggtgaaaccccatctctactaaaaatacaaaaattcgctgggcatggtggcatgtgtgcacttgtcgtcccagctgctcaagaggctgaggcaggagaatcacttgaacctgggaggcagaggttgcagtgagccgagatcgcgccactgtactccagcctgggtgacagagcgagactccagctcaaaaaaaaaaaaaaaagaaaaaagaaaagaaataattattgaatcaatggaaacagaattacaactcttcccacttttgggaaggagaattgagattcctgctttccccttcaaccctagctttatgtttgttgtgatggtatagaggtcacacatggcagccttgtgtctgttcttaggctgagttcatctacttagggacggggaatcccagattgggcaaaaccaaaagcagggacagaccttggaaaaattgtaaagcagttcttggttgtgctcacccaccatgacaaaatatgcacacacacaacgcaacacacacacagacattttcatgccttcaaggcctaccctacagcctttcccatggtgccaaacccttcttcttaccttacagtcacttaactgtctctgctggtctcttcccactcatttaggcaacaaatatttattgaaaaacttctctgagccagatggtgccaaacagttacctaaagggcagactgtgtgtgtgccagggctgtttcccgccaacactcccctgcaaattgaaataatttcatccttggaaattcaaaaaaatcatgaaaattgtcactgtgggaaaattccaagtagagctgaaccttctaagaagcagagagttcttcttatggtttagtatttttttaaattatgaatcatttcatgttttttcaacactcggagtttctaaaagtctcacttaggtccaagtgctaggctttgtgctaggtgcttcagtaggaagcaggtggagtcgctgcctcacagaagccagtgtggtggaggaacagacaggcactacaacagctgcagtgtgactagtgccatgtggggcagccgctgggatgggagtacagtggaggcacctgcccagtctgagtggatctcctctgatatattttattcgtgtcatcatggcaaatgttgggggactggcattctagggaacaccatctgcccaggattcacagcaagagggaacttgagggataggaaagtgcaccttggaaaaggtttgatgatagagtgtttgagggcggggggtgggggttcttgtaaaataggaggggcaggttcttctatggccgtggattttactctgagggcttaggaagccattgaattttagaaatttcttctccctgctccagggtctcttggggcctcctacatctccccctaggtacctcctaggtccccactttttctctagctctggaacattctcttccatttcccaccttcacagtcctctggagaaggtctgatctccctcactatgacaggaagccaggctctctcatggtgggtgggggaatgcactatgttcaatgcattggaccagcctggccaacatggtgaaaccccgtctgtactaaaaatacaaaaattagcctggcacagtggcaggtgcctgtcatcccagctacttgggagactgaggcaggagaatcgcttgaacccaggaggtggatgttgcaatgagccaagatcgcgccactgcactccagcctggatgacagagtaagaccctgtctaaaacaaaaagaaaaaagcatcggaggcagcaaagagctggtttgagggactgacttgtgggattctggcttctgaaggattgtagaagtgcctcctaccttgctgagagaaacaggtcttgggcatggggtagggttagggtactaggtttgggagccctgggagaggacaggaggggcatgagctgtgccggcctgggagtctgtgctcaccatcctactctctccccagctcccaaaatggcgatgacaccggcacctggcccaacaaccagtttgacacagagatgctgcaagccatgatcttggcgtccgccagtggtaagtggtgtcagtgtgtgtatggaagagtgggagacctggggttctggggtgcatctcacagccaccatgcccacggactggatgtcaaacctgtgtagtttctccagatctttcggcaggtctgaaaggacccacaattccaaacataaagcctggaattgtggctaaggaacagcagaggggttgggggtcctgggatgcctggaggagagcgaacaaggaaaagactcatggagggaatagtggttacaagtctagctctggaatgggacagtgtagctcaggtcctagctctgctactatccttgggacttggatcgacttgctcaatctctctaaacctcagtttcctcagcctagaaagtggggacagggaccccaaagggttgttgtagagattaaatgagatgataccacaaagcatagagttctgggcctggcgcttggaagccctcaagcaatgaaagtgggtgtagaaatccccagccgagagaacacctcctctttatgcgaggctcctcttttgctgcccctaactccagagtaggattctggttttcccataaggttgactaagggcttcctttgtaatagagattcggctagtggtggttgtccctgaagagtcactagggcccagagcaggagaagaagaatatcatttgtccttaagagcacagcctaagctgggcgtggtggctcacgcctgtaatcccagcactttgggaagctgaggcaggaggatcatgaggtcaggagttcgaaaccggcctggccaacatagtgaaaccctgtctctactaaaaatacaaaaattagctgggcatggtggtgcgtgcctgtagtcccagctacttgggaggctgaggcaggagaatcgcttgaacctgggaggtggctgtggtgagcagaaaatcgcaccactgcactccagcctgggcaacagtctcgctctgtctcaaaaaaaaaaaaaaaaaaaaagagcacaggctttagaggcaggccaatctggattcaaatcctggcacctggcaccaccacttagcaatgagtccttaggtaagttattaaaccccctcggtttcacttactattaatgggcacagtattaacggatctcattgtggtgttaccagggccaaatgcaagtccctcagcacaggattggcagagagtaagggcacaatatattattatctttgctgacccaaacccgttttttactgggtagaaagcagaattagaataatgcctattaataaagactagcttctggagcagcaaatcctgggcttataaggaggctggcagaggatcaaggcattgccctatatcatgaactgatagccctgccctccagcatgtctggaggactggtgggtagagaaccaggtgaaatcacaagaagcactgtcatcacacctgggcacatactaaacaaactttaggggcctcctgtcaatgaatcctctcaatagctctgcaaggcaggtctgatttctcacactcgacagatgagagaaccgagaaggcacttgccccagggtcctcagttttgagctgccaagctgaggttctaacctggctcaactcctaagtttatgctctttctactatagggaccatggctgcctttggatccagcctcggcttctctattacctgagcaggatgagaggctgtcctcttcctcgagctctgctttattcttccagatcagggttgccagataaaatacaggatgcccagttacagttgaatgtcagataaacagcaagtactatttcagcataagtcagtctcaaatgttgcatgagacataatgtactaaaaaaaaaaatgctcattgtttacctgaaattcaaatttaactgggagccctgtacttttatttactaaatctggcaactctaccccagatgtctgtgaggttaagtggggccaggcctacagctgacggaaggacagagagagaggtggcagggactgctggcctcctgaggcagagctgtcccaggtctggtggggctatgattccagagaggccagagactgagtatgaaagtggcaggcggctgggtctgaggagatgccaagttggcctcttgagggaaataaacaggtatatttagctgttgtggccttgcgccctgaggccaggaagcagctttttagcctaaatccagatgttaaaaacagaaatgaaatcagtatttatggccccaaaccctccaagcaagtcatgcagctcgttcccctgtcaaggcctcccacctttggcccacacagggcctgaccctcgtctaagcctgcgccctggggaacggaccctgggggtggaggtggtgggtcaggccctgctctcactttcacacccgcttcctagccctgaaaccagagaggttcctgaagtccagcccagccaggcctgtggggctgctgagaggggttaagtaagagggagagtaaaaaccgacacttgggaggaggcttttaaaataaacatctgcggggagggatgctctcaaggaggctgcggtttgcagctcagccagctgtgttccagctaatcagcctccttgggctactctggagttgctgccttggccctgggatggggtaggttaagaggacagagggaggtcagggagctgggggctgagtttccctgagtagaggctggcacaggagagaaggcatcacccccacctcgtccaggccagaagatgtccagcttcttgaggctctcctaagtctgcctctcctgggaccaagagaaaatcccggtccttgaccaaggtgggccttggggggagtggggtgtagagggaggggcactggagaactgactctacagaaagtcaaagctggcaatccaacttcttcccctcagatttatagatgggaaaacaggcttgagccacgcagagacttgaccaagctcacacagttccttagtggcagagcagagcaaatattctctttcttttacattctggatttccatatcttctctccctcctggtccagcccaacctcagggcaccccccacgaggtgggcgggggatggctttgtcacttgcacccactcggggtgctactcagagatcttgggtgcacataggacgtgggtgggccgagcttctagctactccgtcaggcccttcctgtcattctgtctctgcctcccttctccctgcttctccgtgttcctcctcattcttttctgtgtgcagggagactacaccccccaccccgctctttctctggcgcctctgaggtcccccctctagcccctaaatcactctggaatcctggctctttgaagccagatctgggcccccctcccctaccccttccattcccaggctgggaaaggctgaagaggctgacggctggaggggagggggcggggcggtggcggatctggcttccttttggagttaattagggaaaacagagaaatgtcagcggaatgaaagggctgggggtgggggccagctggggtaggagaggaggaagtgggcagctgctccctcccactcaacccctctcccccgcccccagaaagctctcagctccggggatttgcgacatgaaatgggggctgtagaaacctgagcgctggtgcgtgaagagaaaaaccgaggcgcatcccggctctcccctcccgtgtgccctcctcctcttatgccggcttgaaaatatttcctgtctctctatttctcaatccctggttgatgtcccaggattactcagcctctccggctttagtcactctcgctacccgctcccagggtccagggtggaggcagagggaggctgggagagaagctctactgccagctgggcctgggctggcctgggcatccctgaggttttaactgtctcctaaccacagaggatctcagggcctccagcagcgagccccaatgagtcaaactcttgtttcctcctctcccacccccgacccagtcagggcaggtgaggggtagaggtgatggcatgctggatgtgacggtgttgatgatgtattgcacaggatgaagcaccatctcatttagtcctcacagcagccttcacagtgcgtacaaatcagctggcaattccgagaggctgcattctaaacaagttcctgggtgatgctgagccagggccagagtgtggacttctctgggccccagtttcttcttctgtacagtgggacgttggactggaggtgctgtctgatgtcacctagctgtggcactctgagcctgtgcctaaagtgtccctgagatgtctagtccccgagatcatcatctcctcagcttcatagagccgagctcttctccatcttctctctacctcccattcactcagaacagggataaggtccaagctgctggtggtgatggtgactgactgtcccttccagcatgcgcttaggtacacttgggcctgaatgcccctctaacaaatgctaccgggtatggccttggtccttctaacacttggttccctcatctgtaaaatgagggtcataccacatagctggctgggctgttatgtagaggttaaaagtgattgtgcatgtgaagcatccagcagagtgcctggcacacagtaggtgctcaaatgctgttttgaaatacaaaaattagctgggctagtggtgtgcacctgtaatctcagctactcaggaggttgaggcaggagaatcacttgagcccaggaggcagaggttgcagtgagccgggatcgcgccactgcactccaggctgggcgacagagcaggactccatcttaaaaaaaaaaaaaaaaaaatgctgttttgaaatggaggcttggaagagcactcttcacccccaccccacacacttactaacggaactaccgaatctctactcgtgccaggccttgcttggcaaaggctaggggcatgtaaagccatggtttcatggctgctgccctccaggagcccatggtctagtgtgggagtcagaggctcccttgagaaagccagggcaaggaactgagagcccgtgtcacagccctgagagaaataccagcgaatgtgttttgagcacttacatctaccaggcactattttacgtacctgacatacattttcttatttagcattcactaaaaccagaagaggtggttaccattatcatccccattttgcagatgagaaaactgaagtggcataaggaggttaggtagacttgcccaggatcacagtgagtaaggaaaggagctaggaatcaaacctagactttctcactccagagcctcttaacctctaccctcaactcttgtgaagagagactaccttggtgacccctatattcccagtgctcagcgtggtcaaggcccagggtgctgtataggcattcattaactgctggggatataagacagtgactgttgaggaccctaagtttagctcccacctgatcttcctctgtctctgcagaagctgctgatgggagctccaccctgggagggggtgccggcaccatgggattgagcgcccgctacggaccccagttcaccctgcagcacgtgcccgactaccgccagaatgtctacatcccaggcagcaatgccacactgaccaacgcagctggcaagcgggatggcaaggccccagcaggtggcaatggcaacaagaagaagtcgggcaagaaggagaagaagtaacatggaggccaggccaagagccacagggcggcctctccccaaccagcccagcttctccttacctgcacccaggcctcagagtttcagggctaacccccagaatactggtaggggccaaggccatgctccccttgggaaacagaaacaagtgcccagtcagcacctaccccttcccccccagggggttgaatatgcaaaagcagttccgctgggaacccccatccaatcaactgctgtacccatgggggtagtggggttactgtagacaccaagaaccatttgccacaccccgtttagttacagctgaactcctccatcttccaaatcaatcaggcccatccatcccatgcctccctcctccccaccccactccaacagttcctctttcccgagtaaggtggttggggtgttgaagtaccaagtaacctacaagcctcctagttctgaaaagttggaagggcatcatgacctcttggcctctcctttgattctcaatcttcccccaaagcatggtttggtgccagccccttcacctccttccagagcccaagatcaatgctcaagttttggaggacatgatcaccatccccatggtactgatgcttgctggatttagggagggcattttgctaccaagcctcttcccaacgccctggggaccagtcttctgttttgtttttcattgtttgacgtttccactgcatgccttgacttcccccacctcctcctcaaacaagagactccactgcatgttccaagacagtatggggtggtaagataaggaagggaagtgtgtggatgtggatggtgggggcatggacaaagcttgacacatcaagttatcaaggccttggaggaggctctgtatgtcctcaggggactgacaacatcctccagattccagccataaaccaataactaggctggacccttcccactacataatagggctcagcccaggcagccagctttgggctgagctaacaggaccaatggattaaactggcatttcagtccaaggaagctcgaagcaggtttaggaccaggtccccttgagaggtcagaggggcctctgtgggtgctgggtactccagaggtgccactggtggaagggtcagcggagccccagcaggaagggtgggccagccaggccattcttagtccctgggttggggaggcagggagctagggcagggaccaaatgaacagaaagtctcagcccaggatggggcttcttcaacagggcccctgccctcctgaagcctcagtccttcaccttgccaggtgccgtttctcttccgtgaaggccactgcccaggtccccagtgcgccccctagtggccatagcctggttaaagttccccagtgcctccttgtgcatagaccttcttctcccacccccttctgcccctgggtccccggccatccagcggggctgccagagaaccccagacctgcccttacagtagtgtagcgccccctccctctttcggctggtgtagaatagccagtagtgtagtgcggtgtgcttttacgtgatggcgggtgggcagcgggcggcgggctccgcgcagccgtctgtccttgatctgcccgcggcggcccgtgttgtgttttgtgctgtgtccacgcgctaaggcgaccccctcccccgtactgacttctcctataagcgcttctcttcgcatagtcacgtagctcccaccccaccctcttcctgtgtctcacgcaagttttatactctaatatttatatggctttttttcttcgacaaaaaaataataaaacgtttcttctgaaaagctgaacgtttctgtataagcgatggaagctcctggcatgtgtgcatgaagtgatgagctgaggtgggtgctggaagaagggcggaatcgggaggccactttgtgtcattgcgcgtctagatgtttccgaattgcgtgtgtgtgtgtgactgtgcaatatggttgtgtatgcttgcaatgccgttgtgcctatgagacagtgtgcgattgtgtgcctatggatctgtgtaccgtgtgccattgtgtgatcggtccgctgtgggggtggggatctgagtgcggcgtgtcagtgtgcagtggagtgtgcagtctaagcttgcggctgtctccaggcagaagaggagaccccggcgcgggcgggggcgggttggcgccgggcaaacgccttgggtagaggggagaggacgtttcgttagttcccgccccttcctgactaaaattgcctacccgaagcgccccggagggcttcacgggaggagggtagactctcctttgcccccgcacccccacccccgctgcctaggggttttgggaaagccgcgggagtgggagggaatgcgggaggtgattcttccaaagccaagtctgcagctcgagcctcagtttccccatctggaattcgccttcccgctgacatctccgtagcgaagcctaagaaattggagggctcatcctcttcttgcgggggtcaaggggactgaaaggacgtgcaggaaatgagatccatcgcagactcagctcccctccctccttcctgtcggtgcttttccactcactcgcctgctctcccatctccccgccccctccgcctgcctcctcgaagcactgtgggattccgaggttgctgcagccagagaagctgcagaaaaacacggagctgggggtgaagggggacttaaaaggggaactacccggaaggacccaagaacacaaagacagagccactgcggttatctggctggtcagcaagggtatgcggcttcctccgcgctgcggaggctcccagagccaggtcacccattctgccagctcaagtctgttgtcatgggaaccaaaccttccaacttaagaatctgggggcgactttctagcgtgggaggaagggtggtgtgcacggttgctgagatggaagcagggttttgttactcagagccaggctgcggaggggcggggtgccgggcgcctgggttctattccaggcacagcagcagactggcagagcgcgtgagcagctgtggtttgtcccctaattggtatgtgtgcctataaagctctgaaccagaaaggcgtggcctccggggggacgggagggaggcggcaggcaacccatccccacacctcaggccatactgaggaggcagctgcccaggctccagggctatttaaaaggcttttatttccagttccagagcccgcccgaatgggtttgtggtcctctccaggcctctccctgtctatcctgggcctgctcattgctggtctggcttttttgtgcaggtcataacg

SEQ ID NO: 446 - DNA, 151650 bp, Homo sapiens
  source 1..151650: mol_type = genomic DNA
tgagactttaggcaattagtttcaccttcaggctctttgttattcaaattttagttttacttcctcttagaatcataatacttcagagtaaagagagtcttcattttagtaggctttggaaattgggaaacaaagaagaaagacttttgcataatggcatggcttgttaatcacagggcatgggtaggacattgtcccattgacttgaagaccaacactcagtaagctaaatgtcttggaatcacaaatgtatttctaaaggacaggcaatgtttgaggtctgaggtgtctgctagaaagagtgcatttaacaaatgtgagaaatcattctctaacatgcattttaacaaattgctcttaagaaaaactacacattgagaaaaatcttacaacctatgttcacatcattttctacaaaatattacttaaaactttgcttttgaatttcctaattatatagaatttttattttcttagttttctatgaaagtgttattaaataaaatgactttctgaaatgtccatttttttcaatcaagaggtttttctatttctgttgtcatataaagatgatagcagtaaatatctgtctcaacatagaaaggtcactcagtacttctcgacaagtatctgctcatgctttcctgcatggatgatgaaataaaaccccatcctccacagttactatactggttgtcactggaactacaaatatttgaacatggtaatagaaaaacataaaaatgcatagttaacccaactcaaacgctgtctgagatagtggagagactttctcaaagtcctcacaagtaacaaagatctttatttcttctgcatatgacagctaatataacttacataaatcagtaggcctgtttggaaaggtgcatggagaactgggtttgtttccttggtattcttatatgcaaataagcacgttttcctaaatttatcctaataaggagatgaaatcttgaatcctacaaaggtaagaatttgaatgtcctaatttaatggactaaatatagataagaggtaaataaaggacataggctcccccgatgacgcattaaataaaatttttgtaaggtattgagatctaataatcatattgatctcagggattgtggaagtcttgctattcagaattaaagctgaattaacggtcataaacaacgctacacagttaaacattaaggatatggcaacattattagaaataaaattataactaaacttaggagaaataaaaatggaatttgatgcagtcactggttaggactctgagtgtcgctgttgaccaaagtgggaaagaagctgccgcagaggcgacccgactctgctccctccatactaaacacacagaccagacaagctcctacgaaaagccaacgctccacgcccattttcgtcagggaatatgtacccatcggctttagataaataaggaaacagcaggctgaaccagaactaagagaaaattgggcagagagaaggcaatggcgagtccacctaggggctggggctgcggagagctgctgctgcccttcatgctcctggggacgctgtgcgagccaggatccgggcagatccgctactcgatgccggaggagctggacaaaggctccttcgtcggcaacatagccaaggaccttgggctggagccccaggagctggcggagcgcggagtccgcatcgtctccagaggtaggacgcagctttttgccctgaacccgcgaagcggcagcttggtcaccgcgggcaggatagaccgggaggagctctgcgctcagagcccactgtgtgtggtgaactttaacatcttggttgagaacaaaatgaaaatttatggagtagaagtagaaataatcgatattaatgataacttcccgcgtttccgggatgaagagttaaaagtaaaagttaatgaaaatgcggctgcagggacacggttagtgcttcccttcgcgcgggatgcggatgtgggtgtgaactctctccggagttaccagctcagctccaatctgcacttctctctggatgtggtaagcggaactgatggacaaaagtatccggagctggtgttggaacagcccctagaccgcgagaaagagactgttcacgacctcctcctcacagctttagatggcggagacccggtactctccggcaccacgcacatccgtgttacggtcctcgacgcaaacgacaatgcgcccctgttcaccccatccgagtacagcgtgagtgttccagagaacatacctgtgggcactcggctgctcatgctaaccgccacggatccagatgagggaataaacgggaaattgacctactcttttcgcaatgaagaagaaaaaatttcggagactttccaacttgattccaacctgggggaaatctcaactctacaatcactggactatgaagaatccagattctacctcatggaagtggtagctcaggatggaggcgctcttgttgccagcgctaaggtggtggtcacagtacaggacgtgaatgacaatgcccccgaagtgatcctcacctctctgaccagttcgatctctgaagactgtcttcccggaactgtaatcgcgctgtttagcgtacatgatggtgattctggagaaaatggtgagattgcatgctctattcctaggaatttgccttttaaattggagaagtcagttgataattactatcacctattaacaactagggacctggacagagaagagacttcagattataatatcactttaaccgtcatggaccatggaaccccgcccctctctacagaaagccacatccccttgaaagtagcagacgttaatgacaacccacccaatttccctcaagcctcctactccacctctgtcacagaaaacaatcccagaggtgtctctatcttctctgtgacagcccatgaccccgacagcggcgacaacgctcgagtcacctactccctggctgaagacacatttcagggggcgcccttgtcctcctatgtatccattaactctgacaccggtgtcctgtatgctctgagatccttcgactatgagcagttgagagacctacagttgtgggtgacagccagcgacagtgggaaccctccacttagcagcaacgtgtcgctgagcctgtttgtgctggaccagaacgacaatacgcctgagatcctgtaccccgccctccccacagacggttccacgggcgtggagctggcgcctcgctccgcagaacctggctacctggtgaccaaggtggtagcggtggacaaagattcaggccagaacgcctggctgtcctaccgcctgcttaaggccagcgagccaggactctttgcggttgggctgcacacgggcgaggtgcgcacagcgcgagccctgctggacagagacgcgctcaagcagagcctcgtggtggccgtcgaagaccatggccagccccctctgtcagccaccttcacggtcaccgttgccgtggccgacaggatccctgacatcctggctgacctaggcagtatcaagacccccattgaccctgaggatctggacctcacactctatcttgtggtggcagtggctgcagtctcctgcgtcttcctggccttcgtcatcgtgctgctggtgctcagactgaggcgctggcacaagtcacgcctgcttcaggctgaaggcagcaggttggcgggtgtgcccgcctcgcactttgtgggcgtggatggggttcgggctttcctgcagacctattcccacgaggtctccctcaccgcggactcgaggaagagtcacctgatctttccccagcccaactacgcagacacgctccttagtgaagagagctgtgagaaaagcgagcctcttctgatgtctgataaggtagatgcaaacaaagaagaacggcgagttcaggttagttttctctttcggtaaggatgaccagaacattttcatttgtttcctttttcatgtttctgtcatattcagaatcagctagttatgtaaatagtggaacattatttgctgtattggagattaattttttttatataattcatgctttctccatttgttttcaaattctgttttgggaagtctagctgatatctgtagacttaagtgaaacaaataccttaaaggaaagtggttaaatataatcattttacccaaatattttgttatattggaactgcagttctattaatagaaaagatgttttatttattcaaattgttagatatattgttctcttttgagtgtctgcctagacaccattagtgaatgtgttttggaaaggataatgtataggactgatattttagtctacctgaaatttgtttaaggaaataatttacagtatttacataaatcagtggaaaggtacagagaacttctgggtcataaatatcagaaaagaggccgggtgcggtggctgacgcctgtaatcccagcactttgggaggctgaggtgggcggatcacgaggtcaggagatcgagaccatcctggctaacacggtgaaaccctgttctactaaaaatacaaaaaattagccgggcgtggtggcaggcgcctgtagtcccagctactcggaaggctgaggcaggagaatggggtgaacccgggaggaggagcttgcagtaagccgagatcgcgccactgcactccagcctgggagacagaacgagactccgtctcaaaataaataaataaataaataaataaataaataaatatcagaaaagtagataaaatttatattaatgataacatgtagcattctaaagtctggaaagtttgtgttaagccatgtagttattggatatgtgggcttgttgagagaagaaatcagtgtaaaggaaccttaaggttgggcttcgttctgtgatgtaaagcctccagagagttacatactgctgcactcaataaatgtaaatatgtcacacacctggcatcttctgttatagataaaccctttacttattagaatcaatacctactgcaatgttagcgtttctttaagtgtaggtgcaattcttctttattacttgagtttaaggttgtatttgaaaaaaaaagaactcaacttaaagatggttcaaaattttaaatttcatatctaacgtatgtgctcatcttaaattaatagatttgtcttaatgaaatactggcctatgtgcctcaaattccaggaggatgtgttatgtaatgaaagaactactatatttcccttctgcatctgatttgctgaagatgattttcagatgtttcttattaaaatattcttaatccttcaaattttgtacttttaaaaccttgagcatcagcttcaaataatgactaaataaggggaaaaggtaataaaatattacaaatgggatagtaagctacattactcaaccacatgaaaggttaattgacacattaaagaacctaagaccacttgatttttattttttaaacactgttaaagagcattcaagtatatctatatctatatacatatacacacacatatatatacacacatatatatacacacatacacacacacaaacacacatacatacacacatggacattctgaccaaaatgtaaaatgtacaaactcaccgaatagtgaatgcatccaaagagtaacaagagaatctatacagtaggtgtcgacattattcactcctatgtgaaaacttgcttttccattttttttaaaagaaaatgttatatgcttcttagggtaaggtgtttgggaaaaaagtaaaggttatagatttgggtacatttcttctgagttaaatgttttgtgcaatggaaaaatatctttaaaccctctataaactactaacagactataaaatgcttgatccatacattttgaatgtatgtactgtatataccatatacttttaaatatctgaatctttagttttatatgtgttctgaagaataatttttcatactaattgaagtgttcatacaatgaacacttggcattgtgttggaaggcacttgctttggaatgttttggagcaaagtcttgagtcagttatatttttgatgtttgtataaaggtgacaatgagtgtctgtctagaattctggttactgtgagtagtttaagatgctataatgcttttccactataaggtgaattcggtgtggaactcattgcttattgctgcacacttgcctagttttagagtaacaatacattatgtaggctaaagataatttctttaggaagattttctggtttgaaaatggaattaaaactgtaagacacctgtcagaaacatggaaaatggcatgttattgaccagggaaaagtgtaaataacaaaaagttaggattatcagatggtaaactggggaccaaggaaaagtggacaggaagattacttatataattaaataatataattataaggacttacaattcactccccaatcctaataacgcatcattgttaggctacttgagaagaaacagtacatttcaggacaattgtgatgtagtatgaaaaaacatcctttgtaaaagtttttcatttgggccagggtggttcatgactataatcccagcaatttgggacgctgaggtgggaggattgcttaaagccaggtgttctagcccagcctgggcaacatagtgaaaccccacctctatagaaaaaaaaagttttcaatcatacttatttaattaaaagtagacacttggaaacaaaggaaaagagaccctcttgctttttactatacttctattttataaggtcaatcatttcctcattacctttaacttcttttggggggagataataaagataaaagagaagaaagtgaaacatagaataaaactaaaagctatgacattataacttttagaagttagaagtaaaggaaatagaatgcaataagaatacacgtgaagctgatatttcaagcctctttatactacgtcttctgccatcaccaaaaatagcttccatttgtatgattttctatgtattattttatttggccctcatttctactagagtaagcagagaagatattattatgaccattttatgaaaatggaaactaaaaacgtgacgggattgagcaagattatctctgccctttgacaagtaaaaggtacttgatttggatggataaagctcaaattaaaagaaataacagactaaagatatagtaagtatatttaatgttttttaaaagtccttttaaaatgggaagaaagtatcactatcagtacactgccgatttttctcctaactagctccttatttggagctgatttagtcaccattactgcagttctgcagcagaggcgccgggtgccgctcttggctagtgctgtgcaaaatattggctcctcccgctgcagccagctcggaagaaaagtgcactctctatcaggcttcctgcagcggagacacccattagagaacccaagcacaaagacaaagcaaatagttggtcctgctcggagaactcttgggattatttaaagatctcctctcctcggatttagaaaggcaaaggcgcagagagcgggatgggaaatagctccggatggaggggcccagcagggcagaggcgaatgctatttctcttcctgctctctttgttagaccaggttctctccgaaccgatccgctacgctattcccgaggagctggacaggggctcgctggtagggaacctcgccaaggacctggggtttggcgtgggggatttacctactaggaacctgcgggttattgcagagaagaaattctttaccgtgagccccgaaaatgggaacttacttgtgagcgaccgtatagaccgagaggagatttgtggcaagaagtcgacgtgtgttctggaatttgaaatggttgctgaaaagcctttaaacttttttcatgtaactgtgctgatccaggatattaacgacaacccaccgacctttagccaaaatatcactgagctggaaatcagcgaactggctctcactggagccacatttgccctggaatctgcgcaagatcctgatgtaggtgtcaattcgctgcagcagtactacctcagccctgatccgcacttctctttgattcagaaggagaacctggatggcagtaggtacccagagctagtactgaaagcacccctggacagggaagagcagccacatcaccacctggtcctcacagctgtggatgggggcgagccctccagaagctgtaccacccagatcagggtaattgtcgcagatgcaaatgataaccccccagtatttactcaggacatgtacagggtcaatgttgcagagaacctgcccgctggctcctccgtattaaaagtgatggccattgacatggatgagggcatcaatgccgaaatcatctatgccttcatcaatattggcaaggaagtgagacaactgttcaagctggacagtaaaacgggggaactcaccactattggagaactggactttgaagagagagatagctacacaattggggtggaagcaaaggatggtggacatcacactgcatattgtaaagtacagatagatatttcagatgaaaatgacaatgccccggagataaccctggcttctgaatcccaacatatacaagaagatgctgagctggggactgccgttgccctgatcaaaacacatgatctagattctggatttaatggagaaatcctatgccaactaaaaggaaacttcccctttaaaatcgttcaagataccaaaaacacatacaggttggtgacagatggagccctggaccgggagcagatcccagaatacaatgtgacgatcacagctaccgacaaaggcaatccaccgctctcctccagcaagaccatcactctgcacatccttgatgtcaacgacaacgttcccgttttccaccaggcctcctacaccgtgcatgtagctgagaacaatccgcctggagcctccattgcgcatgtcagagcctcggatcccgacttgggacctaatggccttgtctcctactacatcgtggccagtgacctggagccgcgggagctgtcgtcctacgtgtccgtgagcgcgcggagcggggtggtgttcgcgcagcgagccttcgaccacgagcagctgcgtgccttcgagctcactctgcaggcccgcgaccagggctcgcctacgctcagcgccaacgtgagcctgcgcgtgttggtggacgaccgcaacgacaatgcaccgctggtgctgtacccagctctggggcccgaaggctctgcgctcttcgatatggtgccgcgctctgcagagcctggctacctggtgaccaaggtggtggcggtggacgcagactcgggatacaacgcctggctgtcctaccacattgtgcaggccagcgagcccgggctgttcagcctgggcctgcgcacgggtgaggtgcgcacggcgcgtaccttgggcgacagggaggccgcccgccagcgcctgctggtcactgtgcgtgatggaggacagcagcctctttcagccaccgtcatgctgcacctaatcttcgcagatagcttgcaagagatacaacctgaccttagcgaccgccccactccctctgaccctcaggcggagctacagtttcacctagtagtggcgttggccttgatctcagtgctcttcctcctcgcggtgattctggcaatctccctgcgcctgcgatgctcctccagacccgccactgagggctactttcagcctggtgtctgcttcaagactgtacctggagttctccccacctacagcgaaaggactttgccttattcctacaatccgtgtgctgcctcacattcctcaaacaccgagtttaaatttctcaatataaaggctgaaaatgctgcaccacaagatcttctatgtgatgaagcctcttggtttgaaagtaatgacaatccagaaatgccttctaattcaggcaatttgcaaaaggtgagtttcttcaaacctttccttccataaatataattgggtttcaattcattgatttagagataaaaagaatacagattaaatattccctgattacattattttattgattttctggtgtagagtagggtgtctaggaaattctttgtagaatttcctgtagaatatctgtgttgcagttgttctttcatagaaagcctccttttgatagtcttgaaacttttcttaatcctaatacactataatctgaaacatttttaatacagtattatctcacactgtcattttcagacatatctatccagaattagacccaaatcctcacaattaagtggtttacttagttttaatgcagtcaatcctaaaatatatgaaacattatgtatatcttaacacatttttaatgtaacctgtatataatatttttacttccctttgcatgtttttaaaagtatacacagatgttgcctatgtcagggcagtttttaacttctatgctaatcaaaagaaataatggcatctaaaatggcaactcttgtaatgggcactgtaatgaattggttcaaaatgtgtttgtgtagcatatgcctgtagtcccagctactcgggaggctgaggtgggaggatcccttgatcccaggaggtagcagctgcaatgagctataattgtgcccctgcactctagcctgggagacagagcgagactttgtctccaaaaaagtgtttgtggttgttggtacccttactgaaaatgggactagcataaatggtggtgaaatgtgatgataattcaaaatttacagaagattgtaatattatttctgttccccaaggtcctaagagatattttcataaaaatgaatggtaaacttcagagaacatttaaaattattcaaaataatctcttacactcttctaaatgcttcattatcttggggagggaaatattatgagtgtcatctctgcagatttagcagaaataaaatcctctgtgtgatagtttcacaaaacgatgcagtattaagttaggactctaagcgtcgctgttgaccaacctgggcaagaaaatcaacggaaactcaagttacatcctccaacaacaaagcaaattagacgggaaagcaggaaagctgtgcagaaattctgacctgaaacgcttcgcatccggtctctgcttgttgaaggaccttcaccgctatttctgagaagagcaaaagtgatgcagatctgttcttcctcttcttaatcccagagaagttcctaataagccagtaatggcgcctccgcagaggcatccgcagcgcagcgagcaggtcctgctcctcacgctcctggggacgctgtggggggccgcggcagcgcagatccgctactctattcccgaggagctggagaaaggctccttcgtaggcaacatcgtcaaggatctgggactggagccccaggagttggcggagcacggagtccgcatcgtctccagaggtaggatgcagcttttctctctgaatccgcgaaacggcagcttggtcaccgcgggtaggatagaccgcgaggagctctgtgctcagagcccgcggtgtctggtgagttttaacatccttgtcgaggataaactgaatctttatcccgtggaagtggaaatagtggacattaatgacaatacaccccgattcttaaaggaagaattggaagtgaaaattctcgaaaacgcagctccatcctctcgttttccactaatggaggtctatgaccctgatgtgggaatgaactcccttcagggatttaagctcagtggtaatagtcacttctcagtggacgtgcaaagcgaagcccatgggcccaagtacccggagctggtgctggagggcacactggaccgggaaggagaagccgtttaccgcctggtccttactgccatggatggcggcgaccctgtccgctcaagcgtcgcccaaattctggtaacagttctagatgtgaatgacaacactccaatgtttactcagcctgtctaccgtgtaagtgttcctgaaaacctgccagtaggcacaccagtgttggcagtgactgccaccgaccaggatgaaggagtccacggggaagtaacttattcctttgtgaagattacagaaaagatctcacaaattttctgtttgaatgttttgactggagaaatttcaacttctgcaaatctagactatgaggactcgagtttttatgagctgggtgttgaagcccgggatgggccaggtcttcgagacagagcgaaagtcttaataactatcttggatgtcaatgataatgtaccagaagtggttgttacatctggaagcagaacaattgctgaaagtgcacctccaggaacagtaatcgccctttttcaagtgttcgatcgagactctggcctgaatggcctggtaacctgttccatcccgagaagtctcccatttgaattggaaaaatcagttggcaattattatcgattagtgacaaatgcagctctagaccgggaagaggtattcttgtacaacatcactgtgacagccacggacaaaggaacaccacctctgtctacagaaacaatcatctctctaaatgtggcagacaccaacgacaacccgcccaccttcccccattcatcctactcagtctatgtccttgaaaacaaccccaggggtgcctccatcttctctgtgaatgcactggaccctgacgtggaccagaacgcccaagtctcctactcactggcagaagacaccctccagggggcgcccctgtcctcctacgtgtccatcaactccgacactgggattctgtacgccctgcgctccttcgactatgagcagttgagagacctacagctgtgggtgacagccagcgacagcggggacccgcctcttagcagcaacgtgtcactgagcctgtttgtgctggaccagaatgacaatgcgcccgagatcctgtaccccgccctccccacagacggttccactggcgtggagctggcgccccgctccgcagagcccggctacctggtgaccaaggtggtggcggtggacagagactcgggccagaacgcctggctgtcctaccgcctgctcaaggccagcgagccaggacttttctcagtgggcctgcacacgggcgaggtgcgcacggcgcgcgccctgctggacagagacgcgctcaagcagagcctagtggtggccgtccaggaccacggccagccccctctctccgccactgtcacgctcaccgtggccgtggccgacaggatccccgacatcctggccgacctgggcagcctcgagccctccgccaaacccaacgattcggacctcactctgtacctggtggtggcggtggccgcggtctcctgcgtcttcctggccttcgtcatcgtgctgctggcgctcagactgcagcgctggcacaagtcacgcctgctgcaggcttcgggaggtggcttagcgagcatgcccggctcgcactttgtgggcgtggaaggggttcgggctttcctgcagacctattcccacgaggtctcactcactgcagactcgcgtaagagtcatctgattttcccccagcccaactatgccgacacgcttatcaaccaggagagctatgagaaaagcgagcctcttctgataactcaggatttacttgaaacgaaaggagaacccaggcaacttcaggtgagtttctttccgcctaagcgggaagagtaatctgatcttcccgcaacccaactaatcagacaggctcatcagctagatcggctgttatagaagcgaacctcttttggtacaggaagattcgtgattttgtaaagtggaagactcccttgttcaggtgagggtatcgtttttttttttttttttttttgagacggagtctcgctctgtcgcccaggccggactgcggactgcagtggcgcaatctcggctcactgcaagctccgcttcccgggttcacgccattctcctgcctcagcctccctagtagctgggactacaggcgcccgccaccgcgcccggctaatttttttgtatttttagtagagacggggtttcaccttgttagccaggatggtctcgatctcctgacctcatgatccacccgcctcggcctcccaaagtgctgggattacaggcgtgagccaccgcgcccggccgagggtatcgtttttattggttgacaggaaaattcaagattgtctttgattagtgcttagttttcttagccctttgcagagagtcacataattctaatgtttttcttttatatcaaaagaatgttctgaagtcttaattttgtgggggaaaataatgcatgtcctagtttttctttacctttctcttcttggcaaactatttgtgtcttggattgagtacatctcgtttcttaggttttttcctactatgtgacatttgtaaggttctttctttttctaatgtgggaaaaaaaataaccttaatttaggtcagtgttaaagatcaagatcttggttttagctagcatggtggttcacgcctgtaatcccacctcttcaggaggctgaggcaggaggatcccttgagaccaggagtttgagaccagcctgggtgactctgtctctaccaaaaagaaaaaaaagtagccagatgtgtggcgtacacctgtagtcccagctactcgagaagctctgataggaggattgcttaagtccaggggtatgaggctgcagtgagatataattgtgtcactgcaccctagcctgggagacagaatgagactttttctctctctctctcaaaaaaaaaaaaagattttgttttttctcagtgttacttgataactataaacgacagacgttcatacaagagatctttcacctttactacttaggaatcaaaaattatttttgaaaagataagaatcattggtaactgcagcaggggacaccagatctttggtgttaaaagacctgaataacattcctgtaactatctgttatttacttgggccagttacaatcgccattatcttccaattaaaattaagatttaaaagacttctcttatcagagataggatccccctctgttgcccagtctggagtaaaaatccacctgtaactgctgcttatagagtgtgtatccagggcaacttgaatctatgttcctgggttgcaatcctaaagcttggctcaaataagctctacttatattattttttaaaacaagactttccttatctatctgactcaaattctaagaaaataattttataactttttttcaaactctaaagcagcatagtgaacacgtatttgttgacatcaccattattataattattgggttgttaacaataactaagcaccgatgctgtgtgcctactacagtgtcttttgcatactgtgtgcctgatagtatttaagagtgaaaatggccgggtgcggtggctcatgcctgtaatcccaacactttgggaggccaaggcaggcatctcacgaagtcaggagttcgagaccagcctgaccaacatggtgaaaccccgtctctactaaaaatacaaaaattagccaggtggggtggcatgggcctgtaatcgcagctactcgggaggctgaggcaggagaatcgcttgaacccatgaggcagaggttgcagtgagccaagatcgtgccactgcactccagtctgggtgacagagcgagactctgtctcaaaaaataataatgataattaataaataaagagtgaacatgaattttaaaacatgctcggtagtgtctgcttacaggacatatctctaaaaatagatgactgactggtgaatgggagaacaaatgttaatgaggttcaaataaaaatttaaatattttagcattttaacccagacaataaggctttcatcatataggaactctttattgaaatatttcaagaaaaaagggattatcatttagaagactgattagtcttatttattatgactgaaatgtgcaaacagaatcattgtttcatgaacagaaaacagcagagtttttgactgtcaatgatgttcgaatagaaaatggatcactaaggagataggagattctgttatcgacagtcttcaaaagtaagttgatggccctggaatgaatggagtacaggggattctctaatttgatgacttgttgaactacattatagtcaagatttttctccagtcatgagttggaagattctacaatctggtggtattatagaatggattggccacttgtgcatctgaatttgttatgaatgtgtaagaaaaaagcaattgagaagataccttgaaaataaatgagaacctcctttgtaacctgactttgtcagtcttcttaaagataacattgagttgatgtgtttttaaataagctgctaagagtaatatgtgtttttctgaaccaatattgtggtatttacatttaaggaattgttatagatttatttatttcaagtttccaaaggtatatacctaaacaagagatctaatcatacacatcttcaaagctcattttcttgtatctttgtgatataatttgataaaataacaattttaaacaacttgaatcttggatattagtctcatgagttagatgggctgttatacatatgattatttcataaactctgaaagtgtgaatgttattttactatactaccaatttgggatgttaaactacatcttgagcatttgttgttatagggaaagctcactaactacttttcatggagatcaggctggtttattttattctcttattacctgtgaccatttcatttaaacaaataaaatatttctctgatggaaaaactaccaacttctactctcacaaaagtcattcactcatgtggactgaccaactgttaaacatcctggcagtcatggaatttgctaagttatggctaaatgaggttctttaatccacctgcaatacagatcattaataataagataggctatctgaggttttgagagttcagtatagaattttgaagcatcaggaaaaaaaactaccaaattattgtcttattcttattttatggtctgtgaaagcctcttttttttttttttttttttttttttttttgtcagagtcttgctctgtctcccaggctggaatgcagtggtgtgatctctgctcactgcaacttcctcctcctgggttcaagcgattctcctgcctcagcctcccaagtagctgggattacaggtgcatgccaccatgcctagctaattttcatacttttagtagagatggggttttaccatgatggccaggctggtctcaaactcctgaccttaagtgatccacccgcctcagcctctcaaagggctgggattacaggcatgagccactgagcccggcctgaaaggcattcatttctgatcaggcttctgttgaggtggcaattgtcaaaggggaaggagtaaaatctcagaggagaaacattggaagatacctatatctttgcttgagaatgaaaatctaaatggaacttcaaagaactgttttgttgtttgttttttagaaaaaaaagtcccaaaaaagaaaagagagaagataatcaattcgatgcccaggaagccaaatagactttacatagaattctttttaatgcaaccaaacaaatggtcaggattcttcccaatatctcagtcaacaataatatacactctttaaactatgaaatgatttcaatttgatacaatgagcttatgttagattttattaaacatatcttggcggtctagtaaagatctttaatatttaattttatgatgttcgataacttagaaaatgtgaatgctagagacaatgaagccatttactccatagggtatgtatgctttgtgttcggagtagtctataatttaatttaactagctcttatttccttttctccaaagaaggtaccaagacactataaattaattgagacttttttaaaacagtagaataagaaacaaatgtgagatgaaactatgaattttgaggcatcaggtaaaaatggatcaagacattgagagctataacctccaaacatgaaagtttgtttgaaaatatctacaagtgcttacattgtttaataatcatacactttgcttgcctcaacaagaagttcaaaagtactattaaacaaatagaatttaactccagtttacagaattcatctataatacctctattagttcctttaaacaaaatttatctactttgtgaatgcaaagataactatggattattttgatagatcaaaacagaatgtccttcaaagtgttccctgtattctggagcaatgccaccagaaagcagaaataggttacttaggagcctcccacaaaacgaagttaagctttcttagtgttagttctggattctcctcctggttccaccaactactctccaggacctagaagaatttacaaaccaagactgtttcttgccaggtctttattccagagcaggtcattctcttttattctgcaactatgtgaaaggagctttcttttctttctgctagcagagggtagcctcggatccatcaataatttagttttactctatcaacatcagtggagagacgagtacctctaaggatcctgtcaggacagtcctgcattttgctcaaatgctgtctagagatccctgttttctcaattacactagaatagagtaggatgaagatttgaattgcatactaggatgaagacttgaattgaattgcataatgaaaagaatcagccaatccattatccagtttcttatgaattcacagcccagtaggatctctgcagatttctgccttctgtagaaaatgggttgcttctatagctgattgctgcagccaagacaaacaacgatttctttctttttttctcacaagactgggagtgagaatatttggattccgacattgttctactactatataatcaataatcaggaacaaggcaaggcaattccctctttctttctttctttctttcttcttcttttttttttttttttttttttggcagagttttgctcttgttgtccaggctggagtgcaatggtgtgatctcggctcaccacaacctccacctcccgggttcaagcgattttcctgcctcagcctcctgagtagctgggattacaggcgcgcgccaccacgcccggataattttgtatttttagtagagacggggtttctccatgttggtcaggctggtctcaagctcccgacctcaggtgatccgcccgcctcggcctcacaaagtgtgggattacaggcgtgagcaacagcacctggccccccctctcattttttaaacggttaaaatgaaggtgttagaccgtctctaaggttctatacaatcaaaaatttattaaaataggtctatatattttacaacaattttgactttctgaatcttgcatcatggtgtctagaacatatgtgttcaattaatactgaattaattaaaatttatatacactgatgtaaatattttctaagtaaaatctttcatatgtatttaaataaaatttacctttttgccttcaataactgattttcccatgtgcaataacgtgtgagtcagtgcccaaaagagtcacttgaaagttgcaaggcaaagcagttttttaaaaattatctaagattatcaaacaccggtccatgaacactgttgcattaattcagtgtcttaaaatggatttttaattatcagggatatctagagcaaagaaatctaacagggaaattttgaaagatgaaacaattttctatgaaatcagtgtattgtgtgcatcaatgtggtgcagtaacttagtaaggactcacagcgccgctgttcaccaaccagggaaaaatggtgcgagagatcccacagaaaccaccgagttttacagcacagagaaacgacagattgcgataagccctcttccaggctgcactaaactcaagcctctatcctgctggattctgagctccccttcctaagacagaggggtccacccggatacacccgcattctgaagcacttcccgagatcggcgcctaagcaagagaagcaggacgactatggcggctcagccgaggggcggggactacagaggattcttcctgctctccatcctcctggggaccccctgggaagcctgggcaggacgtattctctactccgtgtcggaggagacggacaaagggtcctttgtgggagacatcgccaaggacctggggctggagccccgggagctggcggagcgcggagtccgcatcatctccagaggtaggacgcagcttttcgccctgaaccagcgcagcggcagcttggtcactgcgggcaggatagaccgggaagagatctgcgctcagagtgcgcggtgtctggtaaactttaacatcctgatggaagataaaatgaatctttaccctatagacgtggaaataatagatattaatgacaacgttccaagattcttgacggaagaaataaatgtaaaaataatggagaatacagctcctggggttcggtttccgttaagcgaggctggggatccagatgtgggcacgaactccctccagagttaccagctcagccccaatcgccacttctccctggctgtgcaaagtggagacgatgaaactaagtacccggaactggtgctggagcgggtgctggaccgggaggaagagcgggttcaccacctggtcctcacagcctctgatggcggcgacccgccccgatccagcaccgcccacatccaggtgacagtggtggatgtgaatgaccacacgcctgtcttctctctgcctcagtaccaagtaactgtccccgagaatgtgccagtgggtacaagactgctcacggtacatgctatcgacctggacgagggagtcaatggggaagtgacatattcttttcggaaaataactcctaaacttccaaagatgtttcatctgaactcgcttacaggagaaatatcaactttagaaggattagattatgaagaaactgccttctatgaaatggaggttcaggctcaagatggtcctggtagtctgacaaaggcaaaagtactgatcacagttttagatgtaaatgataatgctccagaagtgactatgacgtctttaagtagctcaatccctgaagacacacctcttgggacagtcattgctcttttctacctacaagacagagattctggaaagaatggtgaggtgacctgcaccattccagaaaacctaccttttaaattagaaaaatcaatagataattattatagattggtcacaaccaaaaacttggaccgggaaacactctctttgtataacatcacactgaaagccacagatggtggaactcctcccttgtccagggaaactcacatattcatgcaggtggcagacaccaacgataacccacccaccttcccccactcatcctactcagtctacatcgctgagaacaaccccagaggggcctccattttcttagtgactgcacaggaccacgacagtgaggataatgcccagatcacttattccttggccgaagacaccatccagggggctccagtgtcctcctatgtctccataaactctgacactggagtcctgtacgcgctgcaatcctttgattatgagcagttgagagaactacaactaagagtgactgcacatgacagcggggacccgcctctcagcagcaacatgtcactgagcctgttcgtgctggaccagaatgacaacccgcccgagatcctgtacccggccctccccacagatggttctactggcatggagctggcaccccgctccgcagagcccggctacctggtgaccaaggtggtggcggtggacaaagattcaggccagaacgcctggctgtcatacctcctgcttaaggccagcgagccaggactctttgcggttgggctgtacacgggcgaggtgcgcacggctcgggccctgctggacagagatgccctcaagcagagcctcgtggtggccgtccaggaccacggtcagcctcctctgtcagccaccgtcacactcaccgtggctgtggctgacagcatccccgaagtcttggccgacctgggcagccttgagccctccgacggtccttacaactatgacctcacgttgtacctggtggtggcggtggccacagtctcctgcgtcttcctagccttcgtcctcgtactgctggcgctcaggctgcggcgctggcacaagtcacgcctgctgcaggcttcagaaggtggcttggcgaacgtgcccacctcgcactttgtgggcatggacggggtgcaggctttcctgcagacctattcccatgaggtctccctcaccgcggactctcggaagagtcacctgatcttcccccagcccaactatgtagacatgctcatcagccaggagagctgtgagaaaaatgattctttgctaacatccgtagattttcaggaatgtaaagaaaacctgccaagtattcaggtgagcccagcccttcctttatttccatgaggaatttatttgcatgatatttctctattattttgcaaaacaaatgttttgaaaatagggatttaaaaaactttatagaggtaaaaatgagtttaccagtttccttcagtggtgacactttaatatagaacacataggatatagtatttctttagtgaaagcctatggacaagattatgaatatgtggactatcacattttataatttccacctactttccaatctatgttccaacctactttcttaactcatatattttatacattggaatgaatcgagtctttcatattgcacaaggttagcaggaataaaacacacctcagctgtcttctcaggattctctttagcattcaaatatgtaaaaggttctgaaagatttcttccatgtgaagatttttttctgtggctgattctgcctccatgtacctcagcttggtggtcctaaaaaatcttgattgcttcttgacctatttacagtataatcatttattaatggggtggtagtagaaggttggatttatgcctaaagaatgaaatgtgtgtgtatcacacttcactaagatctatatcaaagacagacatcaagtctaatgccacactaaaggccatcggacaaaaccaataaaatatgtcaaataaaatgtcattttaagtgttgtaattggcatttgtgacataggcaattacatgttttaacagagaattccagtatgttgttttagtggtacagccagatgaagtgtgtctgtgggctatcaaagtgggagattggggatactggctttgtttcaactgtctcacgtactcaaaccttagaccatcttatgtacacagatcctagaccagtagttgattttatttattaggtctactgaaaaattcagttggaaataacccaatctgggattaactacttccatattcttttgtataacattttagtaaagctcagtatatcaagtgattgtcatccagaaggggtggatgacaaggtaatcttgattccagagacctttgagtattaattaaaaacacacttttagccaggtatggtgttgcaagctgtagcccacctgcatgggaggctgaggcaagaggacagcttgaacccaagaattggaggcccacctagataatataacaagactctgtctcttcaaaaaaagactctttttagactagtgttgtatttggtagtattttgcacatgatagactctgtacaatagtgtgggggatacattttttttttttgacatggagtctcgctctgtcacccaggctggatacattttacaagttctgcagtgttcacatttcagatgtacaatcacttggggtagaagacaatgttgctgacaccaacaatgttactgagggaagatcctatggcagaactacggttataaggtattttgtaaaagaaaatctcctgaccaaaatttattagatgcataaaattgtttttaagcaatggagagacataatcactaaactcagtgagctattgcaatcaaactttccagggattgtttccttcaattcagaggtcaccaaggaatgtaaaataagtgcagaggtaggaagcagtgcttcagtgcagcagatctcagtgactttgtgttttgaggctatgtattatccccctgataactttgaagatgaatgttgtatttcataaccagtaaaataattgtgtaatgaggagaggagtaggctactgcctgtgatcatcgaaatgagaatcacataatattcctgtaatgaaatcactgaaactattgggaagggggtgtatttgaagataagtataaattgcaccttctaaaaggcaattttggtattactgatactctccggaaaaagttgaaataaatcaacttggaggtacttagaaaagtggagaaaatgttaggaacaatgaaagaaagataaaatgtatccagtatatttctaatgagtaagtatggaaaattactgtactctgagacggtttaggccaagtctgtgttatggctatctttatatagatagtgcatgtttgaagattggggaaagcttatgtcaataaatgtttatgtacttaatctacatgatttgcctaaaaatcctcaaagttgggatgaaggcattcctaagagtacatttttagacgtcattaaatatacagacgtatccacgtagtttttgttctttcagttaggcacacaattataattattgcactggttaacttgaagcagcagaggctgtagtttcctagtgctgactctgggcgccgctgttggccaaagtggagagcttggcgctccagatctcctcgcgcagccgcagcgcgctttccagggcagccccagctcagactccccagcgccagcctttacaccgcttcctcctcggaaaaagaagaattttttcttgaactggaactgcaactaaagtccgttcggagatccaaaaatctgcaatacagaggttatttgtaacccggcgtctccaggctggtgagcaagctgaggagagcaagagggatggggagcggcgccggggagctgggccgggctgagaggctgccagtgctctttctcttcctgctgtctttgttctgcccggcgctctgtgagcagatccgctacaggattcccgaggaaatgcccaagggctccgtagtggggaacctcgccacggacctggggttcagcgtccaggagttaccgactcgaaaactgcgcgtcagttcggagaagccttacttcaccgtgagcgcagagagcggggagttgcttgtgagcagcaggctagacagggaggagatatgcgggaagaagccagcttgtgctctggaatttgaggctgttgctgaaaatccactgaacttttatcacgtgaatgtggagatcgaggacattaatgaccacacgccaaaattcacgcaaaattcctttgagctgcaaataagtgagtctgcacagcctggcacacgatttatattaggatctgcccatgatgcggatattggtagcaacacactgcagaattaccaactcagtcccagtgatcatttctcactgataaataaagagaaatcagatggcagtaaataccctgagatggtattgaagacacctttggacagagaaaagcagaaatcctaccacttgactttgactgccttggactttggagctccacccctaagcagcactgcacagatacacgttctagtgactgatgccaatgataatgctccagtgttcagtcaagacgtatacagggtgagcctttcagaaaacgtgtacccggggaccacggtgctacaggtgactgccacggaccaggatgagggtgtcaatgccgagattactttctctttcagtgaagctagccagatcacccaatttgacctgaactctaacaccggggaaattactgttttaaatacattagattttgaagaagtcaaagaatattccatagttttggaagcaagggacggtggaggaatgattgcgcaatgcacagtggaggtagaagtcatagatgaaaatgacaacgccccagaagtgatattccagtctctacccaacctaattatggaggacgccgagctgggaacacatattgctttgctcaaagtccgtgacaaggattccagacacaatggagaagtgacttgtaaattggaaggtgatgttccatttaaaatattaacttcttcaagaaacacgtataaattagtgacagatgctgttctagaccgcgagcagaatccagagtacaatataaccgttacggcaacagatcggggcaagcctcccctctcctccagttccagcatcaccctgcacattggtgatgtaaatgacaacgctccggttttctcacagtcttcctatatagtccacgtggccgagaacaacccgcctggagcctctatttcacaagtcagggcttctgatccggacttggggcccaacggccaagtctcttactgcatcatggccagtgacctggagcagcgggagctgtcatcctacgtgtccataagcgcggagagcggggtggtgttcgcgcagcgcgccttcgaccacgagcagctgcgcgccttcgaactcacactgcaggcccgcgaccagggctcgccagcgctcagcgcgaacgtgagcctgcgcgtgttagtggacgaccgcaacgacaatgcgccacgggtgctgtaccccgcgctgggtcccgacggctctgcgctcttcgatatggtgccgcacgctgcagagcctggctacttggtgaccaaggtagtggcggtggacgcagactcaggacacaacgcctggctgtcctaccacgtgctgcaggctagcgagcccgggctcttcagcctggggctgcgcacgggcgaagtgcgcacagcgcgtgccttaggcgacagggacgccgtccgccagcgccttctggtcgccgtgcgtgacggtggacagccaccactctcggccactgccacgttgcacctggtcttcgccgacagcttgcaggaggtgctgccggatatcactgaccgccccgacccctctgacctccaggctgagctgcagttttacctagtggtggccttggccttgatctcagtgctcttcctcgtggccatgattctggccattgccttgcgcctgcgacgctcctccagccccgcctcctggagctgcttccagcctggtctctgtgttaaatccgaatccgtggttccccccaactacagcgaggggactttgccttattcctacaatctatgtgttgcacatacaggaaagacggagtttaatttcctaaaatgtagtgagcagttgagttcaggacaagacatactttgcggtgattcatctggggccttatttccactttgtaattccagtgaattgacttcccatcaggtgagtttcctttaagtataatttaatgctcattgcctacccatttctccatattcacaagaaaatatacatatttgcaggaaaatatataatttttagatgtcatggatcattttaggaaagttgtagtcagttaaaaagctgtcatatcattctacaaaggaggagtaaagtaggagcaattgtgtggcccaacatttgtttgttttttagccaagcttagatttataaagcaatgagggtgtggttttaaccacaaagtgaaagtgttagacagttgttggctctctcctaaaaagtgaatgagatttttcctatacattttccttcttgttgactaatatatgatgaatacttttttcagcttggatataccataaatataaaaataataaagccaaagaatttaagctaaaattcaacacttttcttaactaatttaactggtatggtctccatagtagtccactgttttgtttcctgtgttaacttcccttttgtttcaaaagctcttagaataaggagtcaactggatttttatgtccatggaccccttgtgattatatgcagtgtacgctgtgtgtgcgtgtgtgtgtgtgtgtgtgtgagagagatccttttacttagaaaaaggtctactatgctcattagaagatcaaaagcagattctccttacttgtaacataggagtttcaggattaatctgtattcaagctcattctatatccttcatcaaagaaaagacaatgttttgtgtctgttgtccctctcacacacagccctaatatataatgtgtaactgccttatctgcagccctaaactaatatagctagaggtcttctaatcattctcctacctctaggaaagaaatatagtcttgaaaactgccaatctggtgtgcatacaaaatatatacaaaataccaaggaacattatatgagccttttgctaggtatatctaagcaactgcttcagttaatggccactttacaaattgctgaaagaaggaaacgtctttcgattcttttttttttctttttttttttttgagacagagtctctgtctgttactcaggctgtagtgcagtggcacaatgatagctccctccagcctcaaactcctgggctcaagcattccttctgcatcagcctcctgactagctggaactcaggctcatgccaccagacctggctaatttttctgttttcagtagagaaaatattttctttcactaatttaactggtatggtttccattgtctacccagttttccatatgcataagaaaatatattcacaggaaaatataaagttttcagatttcatgagtggttttaagaaagttttagtcagtgaaaaaactatcataccagtcttcaaaggaagggtgaaataagttcatctgctacgttgcccaggctggtcttgaagggaaacagacttttttgtagtcatacttatcctttggcttcttagtaagtattatatagtcattactttttgcagttttttagatcaaagtgttaatgtaggtaaagttaattttagaatatatgtaaaagtcaagtctgctttaaatttaatcatctctttggtgaaagggatgggatggagctttgctttttatcatatattcatctgtacctttcaagtattcaaatagaaaaatataaacaatgtaaataaaatagcaaaacaatgtaatatctcataaaactgcaatggtaaaagcatttatcctattgaaattccacaatttttatttgaaaatattatcgacatgtaattcaagtggcatttagaagaataatttaaaagcaacaactctatagaaagcttgtaaaatgattaagtagtttaaaccaaataaaacaatttctgagtcagtcatctccagtaggtctattttagtctcaagataaattcatttctggtgacaactgaagttcttagttatttgttagtatatattggagacatttacaataaagcttagagcacaatgggaaatgaaagtatcatgttttttttaagaccaaatgtattgcagaaatgtgagtaatttaatccgatgctacaatctgatcattctgatctaatctgatcatttaataacactaaataaaaccttcatctcacattctttggctgtttcttttaaaatatgggtttacggataaatcaaataaattcaaaacaaagtaataagcaaatgatttttttttctcagtaatctagtagagtattacatttagaagtaatctgtatctcagtgcagtaactatttaggactgtaagcgccgctgttcacctactggaagacaaatgcaaccgaaaacactcagatctcacacctcacgaagacccgcagatgccacaaactaactgctggactgcagcgaaacccgacccctgtttggaggcactccaggtttccggaggattgtcatctccatagctgcggcaagaaactaaataagacccatttatgcacagtgaagattctgagaggattctgcagcaaaacaacaatggccgctccacagagtcgccccagacgcggcgagctgatcctgctgtgcgcgctgctgggaacgctgtgggaaatcgggaggggacagattcgctactctgtgccagaagagacggacaaaggctccttcgtgggtaatatctccaaggacctggggctggacccccggaagctggcgaagcacggagtccgtatcgtctccagaggtaggacgcagctctttgctctgaacccgcgcagcggcagcttgatcaccgcgggcaggatagatcgggaggagctctgcgctcagagcccgcggtgtctgataaatattaacaccctggttgaggataaaggaaaactctttggggtagaaatagaaataattgatattaacgataataacccaaaattccaggtcgaagatctagaagtaaaaattaacgaaatcgcggttcctggagcacgttatccactcccagaagctgttgacccggatgtgggcgtgaactccctccagagctaccagctcagccccaatcaccacttctccctggacgtgcagactggagacaatggagccataaacccagagctggtgctggagcgcgccctggacagggaggaagaggctgctcaccacctggtcctcacggcctcggatggcggcaagccgcctcgctctagcacagtgcgcatccacgtgacagtgttggatacaaatgacaatgccccggtttttcctcacccgatttaccgagtgaaagtccttgagaacatgcccccaggcacgcggctgcttactgtaacagccagcgacccggatgagggaatcaacggaaaagtggcatacaaattccggaaaattaatgaaaaacaaactccgttattccagcttaatgaaaatactggggaaatatcaatagcaaaaagtctagattatgaagaatgttcattttatgaaatggaaatacaagccgaagatgtgggggcacttctggggaggaccaaattgctcatttcggtggaagatgtaaatgacaatagaccagaagtgatcattacgtctttgtttagcccagtgttagaaaattctcttcccgggacagtaattgccttcttgagtgtgcatgaccaagactctggaaagaatggtcaagttgtctgttacacacgtgataatttaccttttaaattagaaaagtcaataggtaattattatagattagtgacaaggaaatatttggaccgagaaaatgtctctatctacaatatcacagtgatggcctcagatctaggaacaccacctctgtccactgaaactcaaatcgctctgcacgtggcagacattaacgacaaccctcctactttccctcatgcctcctactcagcgtatatcctagagaacaacctgagaggagcctccatcttttccttgactgcacacgaccccgacagccaggagaatgcccaggtcacttactctgtgaccgaggacacgctgcagggggcgcccctgtcctcgtatatctccatcaactctgacaccggtgtcctgtatgcgctgcaatctttcgactatgagcagatccgagacctgcagctactggtaacagccagcgacagcggggacccgcccctcagcagcaacatgtcactgagcctgttcgtgctggaccagaatgacaacgcgcccgagatcctgtaccccgccctccccacagacggttccactggcgtggagctggcgccccgctccgcagagcgtggctacctggtgaccaaggtggtggcggtggacagagactcgggccagaacgcctggctgtcctaccgcctgctcaaggccagcgagccgggactcttctcggtgggtctgcacacgggcgaggtgcgcacggcgcgagccctgctggacagagatgcgctcaagcagagcctcgtggtggccgtccaggaccatggccagccccctctctccgccactgtcacgctcaccgtagccgtggctgacagcatccccgaagtcctgaccgagttgggcagtctgaagccttcggtcgacccgaacgattcgagccttacactctatctcgtggtggcagtggctgccatctcctgtgtcttcctcgcctttgtcgctgtgcttctggggctcaggctgaggcgctggcacaagtcacgcctgctccaggattccggtggcagattggtaggcgtgcctgcctcacattttgtgggtgttgaggaggtacaggctttcctgcagacctattcccaggaagtctccctcaccgccgactcgcggaagagtcacctgatctttccccagcccaactacgcagacatgctcatcagtcaggagggctgtgagaaaaatgattctttgttaacatccgtagattttcatgaatataagaatgaagctgatcatggtcaggtgagtttagttctttgcttgcttttaatttccagatgaattttatttggcataaattatgttttgaaaaacattgtgaagatagttgaaaataatttttaaggtgtatcacagagttttgggtttattttggtggtgttactataaaattgaactctaatagtcataggttattgtttcatttgcttttaaacgacttggaaaagattgttcaaccattttaagccttccagtattttattcctattatcactcattcacttaagaagtagctacccgtccatactggtaattttgctattgtttgtgtgtgtgtgtgtgtgtgtgtgtgtgtgtgtgtgtgtgtgtgtgtgtatcccaaactagaacttcagaaaattatcaagaagtctaaagccttgttattagcttagcaaaagtaaaatatatctcagaatttttagggttatgtttagcatttgaacctgtaactaggctcttgtagatttcttcactttaaacctcttttctgagccctgtttctgtaccagtgcccttcaaaactttaatacttcttaccatccttcaaaacatgaacaaactttaaagatggatcttggtgggagatgagactggttactaaatattaagtatgtgagtcagtggtcacctgggctccatgcccatggagacatgaaatctaaagcctagaatgtccattgctcccccaaacaaaaaacaaaagcaaaaacattagatctgaattaaaatgtaattttaaactgttgaaagtgacttttgtaaaatatgtaagaacatatttcaatacaattccaattagctgtttcggttgtgcattgatgtgaagtggtgagaatgttgatattaagaaccaatgtttcaggtacacaagttctaaataagctgatcaattcaattaaagttattcagtcttggctggacacagtgcctcatgtctgaaatcccagcactttgggaggctggggcaggaggaccgcttgagccccgggggtttgaaactgcagtgagctatgatcatgccactgcactccagcctaggtggcagaactagaccctgtctctaaaaaaactattattaggccgggtgcggtggctcacgcctgtaatcccagcactttgggagactgaggtgggtggatcacctgaggtcaggagttcaagatcagcctggcaaacatggtgaaaccccgtctctactaaaaactacaaaaattagccaggcatggtggcatgcgcctgtggtcccagctactcgggaggctgaggcagaagaatcacttgaacccgggaggtggaggttgcagtgagcctcgatcctgtcactgcactccagcctgggcaacagggtgagactccgtctcaaaaaaaaaaaaaactaatattaatagtaaaaactcggtataggctatccattattgtattcctgcataccttcttgtagcatttgaataaagctaatacctgaattgattgttgtaaggtagaagtagatgacccaataaatgtttgttattaatgaaaaggacatttcctaaggattgtgtagtgttctactgtatggtgcatattcagtggagtgggagttaacttcatagtttgtgtaccatttggatgcacatttgagaggacaacatattattggcactttgcaattttaaaaactcggatgaaagttgccctggtaggaaagaaaatccttactctccctaaaaatgttggctagttgtttttattaatctgacaaatggactaaagaaggttgaccaatgtccacaaatttatgtaaatgaacttatgagcttcatttatccaattccaaagtcatttcagataggataataatgcaatccactagaatatccctttgtaccttgtattgcagaatagataagcatttccccaataactcttaagaatgaatttatgtactgtaaaagatatgacataagagaagtattttgagatatgaagaagagcaacgtagtagggtatatcatttcttagctacatcatatgggcagtatacttgaatgaatatttcctgaagtagaagagtaaagaaaaattatttttataaagaatgttaatatagtcaggaagaggagatgtttggggattggtataaaattgccacaactttacaaaatagttttaaatagtatagatttccctaatatgtgtaatataaaacactagaaatattggggagttggaaatcatagaaatgaacagaagaatgataaaattgtttccatagctaataaaaaatgaatttttgaaatcagtatagtatgaaggctctgagagcaagaactgtatcatattaattattatattgccagtgacaagggcaatacttagttctagctaagagttcaaggtatgtttgcagaatggtgaaagaatggaccaatgtatgcaggtttgtataaaaacccaacgtgatatttctaacaatttggaaaacagagaaagataccttaaagaagttgttataattttttattaagtatatggacgtaaaaacttggcttgttaagttaggcacacaaaaacaattactgcactggttaacttgaagccgcagaggctgtagtttcctagtgctgactctgggcgccgctgttggccaaagtgcagagcttggcgctccagatctcctcgcgcagccgcagcgcgctttccagggcagccccagctcagactccccagcgccggcctttacaccgcttcctcctcggaaaaagaatcgtttcctaaactggaactggaactaaagcccgttcggagatccaaaaatctacaatacagaggttatttgtaacctggcgtctccaggctggtgagcaagctgaggagagcaagagggatggggagcggcgccggggagctgggccgggctgagaggctgccagtgctctttctcttcctgctgtctttgttctgcccggcgctctgtgagcagatccgctacaggattcccgaggaaatgcccaagggctccgtagtggggaacctcgccacggacctggggttcagcgtccaggagttaccgactcgaaaactgcgcgtcagttcggagaagccttacttcaccgtgagcgcagagagcggggagttgcttgtgagcagcaggctagacagggaggagatatgcgggaagaagccagcttgtgctctggaatttgaggctgttgctgaaaatccactgaacttttatcacgtgaatgtggagatcgaggacattaatgaccacacgccaaaattcacgcaaaattcctttgagctgcaaataagtgagtctgcacagcctggcacaagatttatactagaagtagcagaagatgcagatattggcttaaactctctgcagaagtataaactctctcttaacccaagtttctcattaataattaaggagaaacaggatggtagtaaatacccggaactggcactggagaaaaccttagaccgggaacaacagagttaccatcgtttagtcctgactgccttggacggtggacatccacccctaagcggcaccactgagctccggatccaggtaaccgacgccaatgataatcccccggtattcaaccgagacgtgtacagagtcagccttcgggaaaacgtgccaccaggcaccactgtgttgcaagtgtcagccactgaccaagacgagggcatcaactcagaaattacttattccttctacagaaccgggcaaatctttagtctgaattcaaagagcggagaaattaccactcaaaagaaactggattttgaagagaccaaggaatattcaatggttgtagaagggagggatggtggtggactggttgcacaatgtacagttgaaattaatattcaagatgaaaatgacaatagcccagaagttacattccattctctacttgaaatgattctggaaaacgcggtgcctggaacactaattgctttgatcaaaatacatgaccaagattctggggaaaatggggaggttaattgtcaattacaaggcgaagtcccttttaagattatctcttcatccaaaaattcgtataagttggtaacagatggaaccctagaccgagagcaaaccccggagtacaatgtcaccatcacagccacagacaggggcaagccgcccctctcctccagcataagcgtcatcctacatatcagagacgtcaacgataacgctccggttttccaccaggcgtcctacttagtcagtgtacccgaaaacaaccctcctggggcctccatcgcgcaagtctgcgcctcggacctggacttggggttgaacggccaagtctcctactctatcatggccagcgacctagagcctctggcactggcctcttacgtgtccatgagcgcgcaaagtggggtggtgttcgcgcagcgcgcctttgactacgagcagctgcgcaccttcgaactcacactacaggcccgcgaccagggctcgcctgcgctcagcgcaaacgtgagcctgcgcgtgttggtgggcgaccgaaacgacaacgcaccgcgggtgctgtaccccgcgctgggtcccgacggctctgcgctcttcgatatggtgccgcgcgctgcagagcccggctacctggtgaccaaggtagtggccgtggacgcagactcaggacacaacgcctggctgtcctaccacgtgctgcaggctagcgagcccgggctcttcagcctggggctgcgcacaggagaggtgcgcacagcgcgtgccttgggcgacagggacgcggcccgccagcgcctgctggttgctgtgcgtgatggtggacagccgccactctccgccaccgccacgctgcacttggtctttgctgacagcttgcaggaggtgctgccggatatcactgaccgccctgtaccctctgacccccaggctgagctgcagttttacctagtggtggccttggccttgatctcagtgctcttcctcctggccgtgattctggccgttgccttgcgcctgcgacgctcctccagccctgccgcctggagctgcttccaacctggtctctgtgtcaagtctggacctgtggttccccccaactacagtcaggggactttgccttattcctacaacctatgtgttgcacatacaggaaagacggagtttaatttcctaaaatgtagtgagcaattgagttcaggacaagacatactttgtggtgattcatctggggccttatttccactttgtaattccagcgagtcgacttcccatcctgagttggtgagtttcatttatgtctattctttttcattacccacccaattttctgtatttacatgaaactatcgtacattttcaagtccaatgagttgtcttagggaagtcagagctgctcagaaagctgtcctaccattctttaagaggagcagtaaattgtgagtttttatgtcgcataaaagaagtagccttatagatttacaaagtagtgagagtttgctcttagcttcctctctagcaaaaacatttggtgcgtttttttgtcctctttctcaaagctaatgaattttacctattcgttgtctcattctttaacatgtttatattttattgtatgtagataaaccattaaatttaatgtatgtaatcatttaattcatcttttaaagcaaagaaactgctagtagatgtctttcttcactgatttcactggtagttttcatctctttcttatgttcctcatatatgctttcttattcctacctaatggatttatgattttttgaatctcctaaaattttattaaaaatactatatgttggctgggtgcagtggctcatgcctgtaatcccagcactttgggaggccgaggcggttggatcacatggtcaggagttcaagaccagcctgggcaatatggtgaaaacccgtctctactaaaaatacaaaaattagctgggtgtggtggcgggcgcctgtaatcccagctactcaggaggctaagacaggagaattgcttgaacctggcaggtggaggttgcggtgagccgagatcactccattgcattccagcctgggcaacaagagcaaaactccatctcaaaaaaaaggaaggagaaggagaggaagaagaagaaaaatactacatgttatgtgtatgagagagaaagagagagactgattcactgaacttagaaggtccaaatcatccaaataattttctaagtttatccaggttttcttggatgcaaaatccttttccacctctatataattaccagaagaaacttacaaaaaaaaggaaatgctattgcctgaatttctcttgctcggaatcctgacatattcttgaagaaggggaaaaagacaccggatttgtcttatcgtttggagctttaaatataaatgactggatgttttctcaacatccttgtaggatggaaggtgaatacaggattattccatttttaagacaaaaactactagtcttgtgtacatacaaagctcccattacatggtataagtcttttgcttggtttcccttagtatgtgattcagtaaatgggttccttacaaagtgctgagatttcttataataccacttacttttaacctttcagtagttttctttgttgtatattttgtgttctttttcccaaattattatataagtttaagtgatgcttagaataatgtttaagaccactttaaaattgcataatttattgatgaaggattaaaatagaaacttgcttttcagtgtatatgcatttgaatcattgaaacacagtctgtgcatgcattacatattcacattaaaaaactaagcatttttgaaatagcagaaaagtttaagcaattacaaaaatgtgaaaatttccaactttaatcctgttaatatttagcaatattaggcgagaacatctgtaactattgctgaattaatattacttttataatacaaaaatttaaaataaacgtttttccaggaattttatcatcaaaataaaccccagaaaataatttcaaagtggataatctatccttatatatgtattaatacaattatatattttacatttacaaatatataggtataaaaattaaaaatgaatgtacttccaaacaagattgcacataaaaattacttcagaaaattgttaagatacacagaaaaaattgaagcatcataaaaaggaaattataatagtttacatatctagaaatagagtgcaaagttctaccaagaataagaataaattaatattaagcaatggtttgtgattttataatacacttacagaaattttattccactttatttacaactcagatatctaaaaaatagattgcttttgaaatacaaatgcaagaaacaattggagaaatctaaaatcataattagaagagagtagtgttttctttatcagccatctgatataatgttacacatcagtgggtgtagtaacggcttaggactctgagcgccgctgttgatcaactctaagcgaaaatcaggactccatccggatttccagttctgcggctacacaaaacccggcagataccacaaacctgctcccaggctgcagcaaaactcagcctctttcttctaaggaaaagatcaccatactttgcagggtggaagaaagaacctgatgaagcagcgcgcacagagatccttttgagaaaattccaaagcgaggcagcaatggcagctccaaccaaatgccagctccgcggaagattagtcctgctatgctcgctcctggggatgctatgggaggccagggccagtcagattcgctactcagtgcctgaagagacagaaaagggctatattgtgggcaacatctccaaggacctggctctggagccccgggagctggcggagcgccgagtccgcatcgtctctagaggtaggacgcagcttttctctctgaacccgcgcagcggcaccttggtcaccgcgggtaggatagaccgggaggagctctgtgctcagagcccgcggtgtctggtgaactttaaagtcctggttgaagacagagtgaaactgtacggaatagaaatagaagtaactgatattaacgacagcgccccaaagttccaggccgaaagtctggaagtaaaaattaacgaaatcgcggttcctggagcacgttatccacttccagaagctattgatccggatgttggcgtgaactccctccagagctaccagctcagccccaatcaccacttctccctgaacgtgcagactggagacaatggagccataaacccagagctggtgctggagcgcgccctggacagggaggaggcaactgcccaccacctggtcctcacggcctcggatggcggcgagccgcgtcgctccagcacagtgcgcatccatgtgacagtgttggatacaaatgataatgccccggtttttgctcaacggatttaccgagttaaagtccttgagaacgtgcccccaggcacctggctgcttactgcaacagccagcgacctggatgagggaatcaacggaaaagtggcatacaaattctggaaaattaatgaaaaacaatctctgctattccagcttaatgaaaatactggggaaatatcaacagcaaaaagtctagattatgaagaatgttcattttatgaaatggaaatacaagctgaagatggtgggggattgaaagggtggacaaaagtgctcatttcggtggaagatgtaaatgacaatagacctgaagtgaccattacatctctgtttagcccagtgagagaagacgcacctcagggaacagtaattcttcttttcaatgctcatgaccgagactccgggaagaatggtcaagttgtctgttctatccaggagaatctatcttttacattagaaaattcagaagaagattattacagattgttgacggcccaaattcttgaccgagaaaaagcctcagaatataatatcacggtgactgcaacagacagaggaactccgcccctgtccacagaaattcacatcaccctgcaagtgactgacatcaatgataatccacctgctttctctcaagcctcctactcagtctacctcccggaaaacaacgccagaggtacttccatcttctccgtgattgcctatgaccctgatagcaatgagaattctagagttatttactccttggcagaggataccatccaagggtctcctctctccacctatgtctctattaactcagacactggtgtgctgtatgctctgtgctcctttgactatgagcagtttagagatttgcaaatgcaggtgacggcaagtgacagtggaagcccaccacttagcagcaatgtgtcattgagactgtttgttttggaccagaatgacaatgccccagaaatcctgtaccctgccctccccactgatggttctactggtgtggagctggcaccccgctctgcagagcctggctacctggtgaccaaggtggtggcagtggacagagactcaggccagaatgcttggctctcctaccgcctattcaaggccagtgagccagggctcttctcggtggggctgcacacaggtgaagtgcgcacagctcgggccctgctagatagagatgcgctcaaacagagccttgtggtggctgtacaggaccatggccagccccctctctcggccactgtcacgctcacagtagccatagctgacagcatcccagacatcctggctgacctgggcagtcttcagatccctgcagacctggaggcctcagaccttaccctctacctcgttgtggctgtggcagtcgtctcctgtgtcttcctcaccttcgttatcacgctgctggccctcaggctgaggcactggcactcctcgcatctgctgcgggctaccagtgatgggttggctggtgtgcccacctcacactttgtgggtgtagatggggttcgagctttcctacagacctattctcaggagttctccctcaccgctgactcaaggaagagtcacctgatcttcccccagcccaactatgcagacacactcatcagccagcagagctgtgagaaaaatgagcctttgtgcgtctctgttgattccaagtttcctatagaagacacccctttggttccggtgagttcattttttttctttctttcttttctttttttgttttttgttttgttttgtttttgagacagagtcttactctgttacccaggctggaatgcagtggtgtgatctcggctcattgcaacctccgcctcccaaattcaagcgattctcctgcctcagcctcccaagtagagtagctgggactagagtagagtagctgggactacaggcctcccaagtagaataactgggactacaggcacgtgccaccacgcccggctaattttttgtgtgtttttagtagagacggggtgtcaccatgttggccaggctggtcttgaattcctaacctcaagtgatccacccacctcagcctcccaaagcactgggattacaggcgtgagccactgcgcctggcccttaactttctattatagttagctttctctttaactgtctgtacttaaggtagtataagttgatatcagtgtgtttctcatcacttttcactgggcctaattgttgctccaacactgaaaggaggcatttattagttatatttgctgatataactttcatgttctcataataattaacctgctgtcaacgtaaaccatacttcatggggtagctctcagcctgcattgatgtgggctttttgggtagggttgcttcattggttgcagtggactcatatcataaaattcttactcctttttttttttttttaagagatgggggtgtcattctgttgtccagggtggaatgcagtggtgtgggtaaagcttactgcagtctcaatctcctgggcttatgcaatcctcccacctcagccttcacagtagctaggactgaggtgggagggctagcaagctatgttgcccagactggtctcaaacgatcttcctgcttcagtttcccaaagcactgggtgaggtgtgaaccacctcacccagcaaattcttactcctacgatcatttattcaggtcatactatgtttgtaagggtaaactgataaaaaggtaaatgtattcttcttagagaaacagctgaaagcccagatttattgcttctattcttccatttctatgacaggaaaacacctctttgaggttatatttttcagatcacaagtgtgtaaagtctgtttgtgtttacagatattttctgacgaagattcaaacttcagttatccacttccaaaccctagtaaaccaattttttccctttaatggtgaaagttgtcacatcttttattctcatatcttcaaaggtcttaatttcctaatgctttaatgttaaattatggagaatagtaggacattcttcttttctatagtatatgcttgctcaagagaagtttctaagactggacactgtgaaatgacaaaacaaggaattaaaaatatttctctcacttatatattatttctggctcaattctccaacttttgagtctagaaatgaacttgcatatcagatataatttaagaaaatattctcaggaactgctgggaagattctaaaactattttactgtttttagctataaggaagagaataatgtattatttaatgttattttaaacatagtgttgtttcaaatagtaaataacatttcacaagacatttgaaaataagctttgaagttgactcaaaattctatgctaaacatgtgatccatagatacactgatgactgctggcatttctgtggaaatgaagaattgttttatttgtttgtaattatttgggtttcagttgctttatttttaagaaaaaaaagctgaagtgtctgggaatcctttatgacatacagacattttaattatttcaaacacgttttcccccttaagtgggtagcaaaaaaaataaagcatacttcaggctcatatttttaaccatgcaacaagaaaattgttacaatttctgttctgaggagtagccttcatacttagtatttataaatattgaaatgtatgttaatttggggaaaacataacagatatccatgaaggcttgtatgtcatggtaggtagttactattcgataccacaaaaatgtctcttgcccttaaaaccagaacacgaggctcaccagacagatgactgaatggagtatggaaaatctttatttctgtttttcttaggctatgtaggacttaacttattgtgcattggtaacagattgtagaacataagctgaaagataaaattcttgaccttaatgtctcatcttaaaaagaagcattggttgacattctatatctcgtattacttaaaaataatgggggagcgcagtatatattaaacaaagattggctttgtggtgatcattgttgaaggtggggtgatggctatgtgaaggttcactatatatactccctactgttgtataagtttgaaattgtgcataatagatttatttaaaacacaaagcatagaaatatctactataatattatggtgagagcaaaatttgagggggatgtacacctgcattttcgaagaatatatacatttcggagaccgaattcaaaatgaaaaaccgggctgctgtcccgcacggagcctctgggcgccgctgtcggccagtgcagagcaagcgctgacgccggggatccgtcagcctctggcctgggattccctgcgcagccaacaacagaaagaagaaaaccagctcccacacagagcctcccggctgcgcagacctttcccagcacagcggattgccagctccgagacccgggactcctcctgtcctgggccgaatgctcttttagcgcggtagagtgcactttctccaactggaaaagcggggacccagcgagaacccgagcgaacgatgggagggagctgcgcgcagaggcgccgggccggcccgcggcaggtgctatttcctttgctgctgcctttgttctaccccaccctgagtgagccgatccgctactcgattccggaggagctggccaagggctcggtggtggggaacctcgctaaggatctagggctcagtgtcctggatgtgtcggctcgcaagctgcgagtgagcgcggagaagctgcacttcagcgtagacgcggagagcggggacttacttgtgaagaaccgaatagaccgtgagcaaatatgcaaagagagaagaagatgtgagttgcaattggaagctgtggtggaaaatcctttaaatatttttcatgtcattgtggtgattgaggatgttaatgaccacgcccctcaatttgataaaaaggaaatacatttagaaattttcgaatctgcatccgctggtacacgactatcgcttgaccctgccacggatcctgatataaacataaactcaattaaagattataagataaactctaatccttatttttcattaatggttagagttaattccgatggtggcaaatacccagagttatctctggagaaactcctagaccgggaagaacagagatctcatagcttgatattgactgccttggacggaggggacccaccaagaagtgccaccgctcacatagaaatttctgtcaaggataccaatgataaccccccggttttcagcagagacgaatatagaattagtcttagtgaaaatctgccccctgggtcccctgtgttgcaagtgacagccactgaccaggatgagggggtcaatgctgagataaactactacttccgaagcactgcccagagcacaaaacatatgttctcattggatgagaaaacaggtatgattaagaataaccagtcatttgattttgaagatgtagaaaggtacaccatggaagtggaagcgaaggacggaggtggtctctctacccagtgtaaagtaatcatagaaatccttgatgaaaacgacaacagcccagaaataatcatcacttctctctctgatcagattttggagaattcacctccaggaatggttgttgccctcttcaaaacacgggatctggatttcggaggaaatggagaagtcaggtgtaatatagaaacagacattccattcaagatttattcttcttccaataactactacaaactggtgacagatggagccctggaccgagagcagacaccagaatacaatgtcaccatcgtagccactgacaggggcaagccgcctctttcttccagtagaagcatcaccttgtatgtcgctgacatcaacgacaacgccccagttttcgaccagacgtcctacgtggtccacgtggccgagaacaacccgccaggagcctccattgcgcaagtgagcgcctctgacccggatttggggctcaatggccacatctcctactctatagtggcgagtgacctagagcccctggcggtgtcgtcatacgtgtcagtgagcgcgcagagcggggtggtgttcgcgcagcgcgcctttgatcacgagcagctgcgcgccttcgcgctcacgctgcaggcccgcgaccacggctcgcccacgctcagcgccaacgtgagcctgcgcgtgttggtgggagaccgcaatgacaacgcaccgcgggtgctgtacccagctctgggtcctgacggctccgcgttcttcgatatggtacctcgctctgcagagcccggctacctagtgactaaggtggtagcggtggacgccgactcgggacacaacgcctggctgtcctaccacgtgctgcaggccagtgagcccggactcttcagcctggggctgcgcactggggaggtgcgcacggctcgagccttaggcgacagggacgcagcccgccagcgcctgctggtcgctgtgcgtgacggtggacagccgccactctctgccaccgccacgcttcatctggtcttcgcagacaacttgcaagagatactgccagacctcagcgaccgccctgtactctctgacccccaggctgaactgcagttttacctggtggtggccttggccttaatctcagtgctcttcctcctcgccgtgattctggccattgccttgcgcctgcgacgctctctcagccctgctacttgggactgcttccatcctggtctctgtgtcaagtctggacctgtagttccccccaactacagtgaggggactttgccttattcttataatctgtgcattgcacatacgggtacaaaagagtttaatttcctaaaatgcagtgtgcccctacattccaatgaagacatggtttgcagtgtttctcctggagccttaattccacctcatggtggggaggatttgacttcacatcctgagactctgacttcggtgagtttctcttttttgtgtgtgatttatctaatagtctactagtttctcatattttaggcatactactttattttcatatctagaatcatatgtttaaaatccatagctttttacaatattttctcaatgttttttcaattatagttttcactatgtatttggttcataagttgctctatctttttgtaaaataatgtcaccagactgaagatattttgtctttgtcttttttttttttttttttttttgagatggagtctcgcactgttgcctaggctggagtgcagtggcgtgatctctgctcactgcaacctccgccttctgggttcaagcgattctcctgcctcagcctcccaagtagctgggattactggtgcccctcaccacagctaaattttttgtatttttagtagacatggggtttcactatgtcgaccaggctgttcagaaactcctgtcctcgtgatcctcccaccttggcctctcaaagtgctgggattacaggcgtgagccacaatattttgtcaagttctgactatcgaacagaagcagtggtcttggcatctaagaaaacaaacaagtaacctatctattcaaatttgcgaagacttagtgaatttacgatatcttatttatatatttttaaagcctaaaaatattcagaagacaggcccagtggctcacacctataatcacagcactttgataggctgaatcggaaagtatcacttgagcccaagaattgagaccagcctgggcaatatagggagaccccccatctctactaaaacaacaacaacaaaaaaaaacattagcagagtgtggtagcattcccctgtggtcccagctacttgggaggctgagctgggtggattgcttggtcctgggaggtcaaggttgcagtgagccctgatcttgccactgcactccagcctgggcgacagagtgcgaccctgtctctaaaataaataaataaatatgcaggcagggccaagtgtgctgtaatcccagcactttgggaggtggaggtggagaatctcttgagcgcaggaatttgagaccagcctgggcaacacagggagactccatcgctacagaacatttaaaaattagcagggtgtggtggcacatgcctgtggtctcagctactctggtggctgtggtgggagaatcgcttgagcccaggaagtctaggctgcagtgagctgtctaggtgacagagtgagaccctgtctcaaaaaaaaaagacatttctaagaaataaatgaaatactattgcctttgcactcagtctctgtctctgattctctgatagaagatttttgaagaaaaaagataaaatctttgaagagttctatacttggaaggcatagtgacataaacacttctgaacatcctgttctctgtgtgaaagaagtgaacttctataccctttgcatttgagggaacaattgctactgggttgatgggcacacacagttgaagatatgtgaaccactggactttggcctctgatacaaactgcctaagagaagagattatttatactggtattaatgctctgatgaaaacaggtcatttgacataaacacttacttgttaaaaacctatatcactacatctaactttgttttctaaaacttttagtacttcaaattctacgtatttcttttctcattacaatgcaaacagtttaatttgcaactgtaatatatgttcattttagtttgtgattacctgcttaatcatttaaataggtccatttaacttgtatccctgtaagataaagtatgttttacacaaaaaggttaattaaggctcagtaaaactattctagaagagtactttaaaaacctcttacacaatcctaagctaaataagtttaatgaattaagtagttacaattataaagcttcagagtgaattatctcatgagtttatttaatataatctttgtatgaatgtatactaaataaaattggcctattcaaatcacaattttaaattataagacttttctgaatttacctagacactaatatgacctaaaataagtattatttaccttttattaaagtgtgtacatttctgttgggaaaacgtgttgcaaatatatatttaaccaaacattatcttgaaatatttacaatattttcactccactttatcacacctcccctaagaaacctacatatagtaaattatttaaagataggagtggagaaaccaaagaatctatgtaaaatataataatccaacagaatagtttactttccattgcatgtatcacttgggtgcagtaacttcttaggactctgagcgccgctgttcacctactaggagagaaaacgcagccagagctcaatccggattctcagggcttcaactacacaagccccacaaaccggctgctgggctgcagggaagctcactccagaatttaaagtgcccaggctacagagacaccctgaagccacagaaagacaaaggaaccggttgaaacacacaacgtgtccagtgaggactttgcagaattctgtaaccagactacaatggccgctcaaaggaatcgctcaaaggaatcaaaggattgcagcgggctggtcctgctctgccttttcttcgggattccatgggaggctggagcccggcagatctcctactcaattcctgaggaattagagaaaggctctttcgtgggcaacatctccaaggacttgggtctggcgccccgggagctggcggagcgcggagtccgcatagtctccagaggtaggacgcagcttttctctctgaacccgcgcagcggcagcttgatcaccgcgggcaggatagaccgggaggagctctgcgctcagagcgcgcggtgcgtggtgagttttaatatccttgtggaagacagggtgaaactttttgggatagaaatagaagtaactgatatcaatgacaatgctccaaaattccaagcagaaaatctagacgtaaaaattaatgaaaatgtcgctgcgggaatgcgttttcctctcccggaagctattgatccggatgtgggcgtgaactccctgcagagctatcagctcagccccaataagcacttctccctaagagttcagagccgtgccaatggcgtcaagtacccggagctggtactggagcactccctagatcgcgaggaagaggccattcaccacctggtcctcaccgcctccgacgggggtgaccctctccgatctggcactgtccttgtcagtgtgactgtcttcgatgcaaatgacaacgcgccggtcttcaccttgccagaataccgagtgagtgttcctgagaatttgcctgtgggcactcagctgctgacagtcacagccaccgacagggacgaaggtgccaatggagaagtgacatattcattccgaaaattacctgacacgcaattgttgaagttccaactaaacaaatatactggagaaataaaaatatcagaaaatctagattatgaagaaaccggtttctatgaaatagaaatacaagcagaagatggaggagcatatcttgcaactgcaaaagtgttgattacagtagaagatgtaaatgacaacagtccagagctgaccatcacgtctctatttagtccagtgactgaagattcacctctgggaacagtcgtagcccttttaaatgtgcatgatttagactctgagcagaatggacaggtaacctgttccattttggcgtatctaccatttaaattagaaaagtccattgacagttattacagattggtgatacacagagcccttgacagggaacaggtatcctcttacaatatcacagtgacagccacagatgggggaagtcctcctctatcaacggaagctcactttatgctacaagtggcagatatcaatgacaacccacctaccttctctcaagtctcctactttacctatatcccagagaacaacgccaggggtgcctccatcttctcagtgacagcgctggacccggacagcaaagagaatgcccagattatttactccctggctgaagacaccatccagggggtacctctgtcctcatacatatccatcaactcagacactggcgtcctgtatgcactcagatccttcgactatgagcagtttcatgagctacagatgcaggtgacagccagcgacagcggggatcctccactcagcagcaacgtgtcgttgagcctgtttgtgctggaccagaacgacaatgcgcccgagatcctgtaccccgccctccccacagacggttccacaggcgtggagctggcgccccgctccgcagagcccggctacctggtgaccaaggtggtggcggtggacagagactccggccagaacgcctggctgtcctaccgtctgctcaaggccagcgagccgggactcttcgcggtgggggagcacacgggcgaggtgcgcacggcgcgagccctgctggacagagacgcgctcaagcaaagcctcgtagtggccgtccaggaccacggccagccccctctctccgccactgtcacgctcaccgtggccgtggccgacagcatcccccaagtcctggcggacctcggcagcttcgagtctccagctaactctgaaacctcagacctcactctgtacctggtggtagcggtggccgcggtctcctgcgtcttcctggccttcgtcatcgtgctgctggcgcacaggctgcggcgctggcacaagtcacgcctgctgcaggcttcaggaggcggcttgacaggtgtgtccggctcgcactttgtgggcgtggacggggttcgggctttcctgcagacctattcccacgaggtctctctcaccgcggactcgcgaaagagtcacctgatcttcccccagcccaattatgcggacacgctcatcagccaggagagctgtgagaaaaacgatcctttgtctttgttagatgattcgaagtttcctatagaggataccccattggttccagtgagttttattttcatttttacttttgttaaaaaaaaaaagattggtttttactttgaagtttgcggcatgatggtggaaagtgtaaatgctaaaacactgatgagtagaatttgatgtttattaaggttttttttttttttttttttttttttttttttactttctggtaaaattcacctagtctcaatcaaggcctatatatcataaggctttgttatgattagctttgcagaaccttgtagtttatagtgttgttgagtacaatattgacaattcctaagacagacttccatacagaagtgcctgtcaatttatatttcctcctgggtggtcacatattgaaactccagccccttaagcaaccctcttgttctgaaggcaggtctggtaagaataggtaagtatcagaaagaaatcacctctggaaacacaacccaaatccaagaatactcaatgcagttcttcccaaggagaagggcaataggcctttttcaaactacattttatatatttttcaatctatactttgtggtgatagttgcagttgaatatactaagtttttcattaatattgaattaacaatttatttataacaatgtatgcttagatttttccagccctatttataactgataacactgcagtatcctttttgcatacaattctctaatttcacactgctatgtggaagatatagcattttaatttaactttcattgctcaatagggatcctgaggaggctatagagggtgaaattaagaatatttgggattctgcttttgtcttttttgttaaattttctagtgactaaggctgaaagtaaatatgggttgggaagacagataaatttgtacatgttcccgagaacaggagcaagagatatatgacaaagctatttcagtggctctttaatgtataaggaggcaaacacctgaaactctgaaaactctgaaattgagaggcaaaataaacttagagtcaagaaagaaatgccatttctgcagatcagaatataaacaccaaccacagctgtaaaaaagaaaagaatatatgcaacgaagggaaattatataaacaaaggatcattggaggtactgatgagttcatttagttcaatgaaaatagtgacgtattaggtagatctcttaattttattactagtattctactaaatgtggtagtataaagtcaaaaagcattccgaagtttctcaagacccttataattccatgatttttttcaggtcagtcaacatttgttgaatgataggtctgtggaaggaaagcacactctttagggtcatagttattaactattaaaccattgaaactattattttatatttgtgttaatgagagtcaaaattattgtgcattcatctcaaataattctattattttgaaaaatacaggttttttttttaaaaaaaactgctcttgacattgtagctattgtgagaaaatattttgattataattatttaaaagcaatacaggacaccctggatgatggtaatgactagggcaatggttgcattccagtacttaagtatgaaataaggaattattactttctgggtgaatataggctagaattgaagacaaaaaaatttgttgcttatcttcagtacttccagcttcatagataattactcttaaaaggaacaagaatgactgcctctggatggaggaattggatagcaatgggccgtgggataggagacctataaaccttcatgctatattattttgtgcctttttaaattttgaagaaaaaatattcatttattcaagatatatgtaaattcagtaaataaaaagatatgatagttatgaccaagtggaaatatatttcctgatgtaaaaggaatcactgaggaaaaagattaaaatattttggctgtcaactcgtagtttaaaaaaaattccttgaaagaggtagagaaaagtcaagttgcagtcccacacagagcctctgggcgccgccgtcggccagtgcagagcaagcgctgacgccggggatccctcagcctctagcctgggattccctgcgcagccaacaacagaaaagaaaaccagctcccacacagaggctcccggctgcgcagaccttgcccagcacaccagattgccagctccgagacccgggactcctcctgtcctgggccgaatgctcttttagcgcggtagagtgcactttctccaactggaaaagcggggacccagcgagaacccgagcgaacgatgggagggagctgcgcgcagaggcgccgggccggcccgcggcaggtactatttcctttgctgctgcctttgttctaccccacgctgtgtgagccgatccgctactcgattccggaggagctggccaagggctcggtggtggggaacctcgctaaggatctagggcttagtgtcctggatgtgtcggctcgcgagctgcgagtgagcgcggagaagctgcacttcagcgtagacgcgcagagcggggacttacttgtgaaggaccgaatagaccgtgagcaaatatgcaaagagagaagaagatgtgagttgcaattggaagctgtggtggaaaatcctttaaatatttttcatgtcattgtggtgattgaggatgttaatgaccacgcccctcaattccggaaagatgaaataaacttagaaatcagtgaatccgtcagcctggggatgggaacaattcttgagtctgcagaagatcctgatattagtatgaattcgctgagcaaataccaactaagtcctaacgagtatttctcattggtggagaaagacaatcctgatggtggcaaatatccagaattagtattgcagaagactctggaccgagaaacgcagagcgctcaccacttggtactgaccgccttagatggtggggaccctccccgaagcggtactgctcagataagaatcctggtaatagatgccaatgacaaccccccagtgttcagccaggacgtgtacagggttagccttcgggaagacgtgcctccaggcacctccatcctgagagtgaaggccactgaccaggacgagggcatcaactcagagatcacttattccttctttggtgtggctgacaaagctcagcacgtgttctctctggattacactacaggaaacattctaactcagcagcctttggattttgaagaagtagaaagatatacgataaacatagaagcaaaagaccgaggatctctctcaacacggtgtaaagtaattgtagaagttgtagacgaaaacgacaacagcccagaaataatcatcacgtcactctctgatcagattatggaggattcccctccaggagtggttgttgccctcttcaaaacacgggaccaagactcaggggaaaatggggaagtcaggtgtagcttaagtagaggtgttccatttaagattcattcttcttctaataattactacaagctagtaacagatgaggccctggatcgggagcagaccccagagtacaacgtcaccatcgcagccacagacaggggcaagcctccgttatcctccagcaaaaccataaccctgcacattactgacgtcaatgacaacgcgccggttttcggacagtcagcctacctggtccacgtgccagaaaacaaccagccgggtgcctccatagcgcaagtcagtgcctctgacccagacttcgggctcaacggccgtgtctcctactctctcattgccagcgacctggagtcacgaacgctgtcgtcctacgtgtccgtgagcgcgcagagcggggtggtgttcgcgcagcgcgccttcgaccacgagcagctgcgcaccttcgagctcacgctgcaggcccgcgaccagggctcgcccgcgctcagcgccaatgtgagcctgcgcgtgttggtgggcgaccgtaacgacaacgcaccgcgggtgctgtaccctgcgctgggtcccgacggctccgcgctcttcgacacagtgccgcgggccgcgcagccaggctacctggtgaccaaggtggtggccgtggacgcggactcggggcacaatgcctggctgtcctaccacgtggtgcaggccagtgagcccgggctcttcagcctggggctgcgaacaggcgaggtgcgcatggtgcgtgctttgggtgacaaggactcggtccgccagcgcctgctagtcgctgtaagagatggaggacagccacccctttcagccactgccacgctgcacctggtgttcgcagatagcttgcaagaggtactgccggatttcagcgaccatcccacaccctctgactcccaggctgagatgcagttttacctggtggtggccttggccttgatttctgtgctctttctcctcgcggtgattctagctattgctctacgcctgcgacagtctttcagccctactgcaggagactgctttgagtcagttctctgctccaagtccggacctgtgggtccccccaactacagtgagggaacgttgccctatgcctataatttttgtgtgcctggggatcaaatgaatccagaatttaattttttcacatctgttgatcattgtccagccacacaagataacctcaacaaagatagcatgctactggctagcattttaactcccagcgttgaagcagataagaagattcttaaacaggtaagtatttaaaaatgtatttaatcctttttatattacaatatgccaatatattccaatatagtggtattattttaagattctagataacttcttcatagagttcgcaaaatataggtcaaatttatggttatcattattaaaacaaaagtttaaattaaatgcctcagtcttcctactattcaaagacattttaaagcaaactacatgggtaatctccggtgacatttttatgaagtaaaatacctttcggttaaaaatataaaatacaggtatatttttacggcatggtattttaattgaaaccctgatgctactcaatttttctcaagtatttcatcttcatttactcaataaaggaaccttgtaagaattatagttaggcatcctacctgatgattttatcgggaccgtattatttccacttccagaaatgtcgttcctttcagtcggttaaaatcaattggaaccaactacaacctacaagttttcagctccagtaatattttgaaaactttttaaaaattaagcaagcccttttaataattactcctttcgcaggtgttcttggtaaagttttaacgtcacataatgtaagtattgtgtatcatcgtttttaagctctacaaatacgtgtgattcacaaaggtgagcgtaatcatttcttctggaatttcttagtcgttgcaataataagaatgggctctaggcgccgctgctcaccaatcagggaatgggaagctgcgcgccattgagtccctccctcccccgcctctaccacacaaagcggaatgagatggatactcacagatcctgacactggagacttagaagtattttccttcgctttctgatatattttggatgtagtcggcctaggacttcatagatacataagccgattcacaaccaaccagctcgagaaaccgcggaatatcggcttagagcctgccatggcgaatcggctacagcgcggggaccgcagtcggctgctgctgctgctgtgcattttcctggggacgctgcgggggttccgggccaggcagatccgatattcggtgccagaagagaccgaaaagggctccttcgtgggcaatatctccaaggacctggggctggagccccgggagctggcgaagcgcggagtccgcatcgtctccagagggaagacacagcttttcgctgtgaatccgcgaagcggcagcttgatcacggcaggcaggatagaccgggaggagctctgtgagacggtgtcctcctgttttttaaatatggaacttctcgtggaagacaccttgaagatttacggagtggaggtggaaataatagatattaatgataacgcccccagcttccaggaggacgaagtggagataaaagtcagtgagcacgcaattcctggggcgcgatttgctcttcctaatgctagggatccagatgtgggcgtgaactccctccagagctaccagctcagccctaataattacttttccttgcaactgcggggcagaacggatggggccaagaatccagagctagtactggagggaagcctggaccgagagaaagaggctgctcacctgctcctcctcacagctttagatggaggcgatcccatccgaaagggcgcagttcccattcgtgtggtggtcctcgatgtaaatgatcacatcccaatgtttacacagtccgtatatcgcgtgagtgttccagaaaacatcagctccggaactcgggtgctgatggttaatgcaacggatccagacgagggaatcaacggggaagtaatgtattcatttcggaacatggaaagcaaggcttctgaaatattccaattggattcacaaactggagaagttcaagtacgggggtctctggattttgaaaaatatagattctatgagatggaaattcaaggccaagatggtggaggtctctttaccaccacgacgatgttgatcactgttgtggatgtgaatgataacgctccagaaataactatcacctcttctattaattcaattctggaaaactctcctccaggtacagtgattgctcttctaaatgtgcaagatcaagattctggagaaaatggtcaagtctcctgttttattcctaaccacctgccttttaaattagaaaagacttatggaaattattacaaattgataacaagcagagtgctggacagggagttggtccagagctacaatataacgttgacagccacagaccagggaagcccgcctttgtctgcagaaactcatgtctggctgaatgtggcagatgacaacgataaccctcccgtttttcctcactcctcttactctgcctacattcccgaaaacaaccccaggggtgcctccatcttctcagtgaccgccctcgacccggacagcaaacagaatgccctggtcacttactctctgacggatgacactgtccagggggtgcctctgtcctcctatgtctctattaactccaacactggtgttctctatgccctacaatccttcgactatgagcagtttcgagacttagaactgagagtgatagcacgtgacagcggggacccgcccctcagcagcaacgtgtcgctgagcctgttcgtgctggaccagaacgacaatgcgcccgagatcctgtaccctgccctccccacagacggctccactggcgtggagctggcgccccgctctgcggaacctggctacctggtgaccaaggtggttgcggtggacaaagattcaggccagaacgcctggctgtcctatcgcctgcttaaggccagcgagccgggactcttcgcggtgggggagcacacgggcgaggtgcgtacagcgcgggcactgctggacagagacgcgctcaagcagagcctcgtggtggccgtccaggaccacggccagccccctctctcggccaccgtcacgctcaccgtggctgtggccgacagcatccccgaagtcctggcggacctcggcagcctcgagtctctggctaactctgaaacctcagacctctcgctgtacttggtggtggcggtggccgcagtctcctgcatcttcctggtctttgtcatcgtgctgctggcactcaggctgtggcgctggcataagtcacgcctgctgcaggcttctgaaggcgggttggcaggtatgcccacgtcacattttgtaggcgtggacggggtacaggctttcctgcaaacctattcccacgaggtctctctcattgcggactcgcagaagagtcacctgattttcccccagcccaactatggggacacgctcatcagccaggagagctgtgagaaaagcgagccactcttgatagctgaagactcagctatcattttaggcaaatgtgacccgacaagtaatcaggtgagatttatttctctgcctcctaattgttggtgtcttggcacaagtcttttaaggagatgttttttgagcctgttatgaaaactgtttggggggggggtggggcggcatatatttagttcatatatatttagagcaatacatgtgagttttactttgcctttcatgagattacgataatctttcagaacgtttttgtgaaagtcatttttcaatcttggcatattttcttttgatttcaaaggggccattcaactatgctggtttggtttgaagtaagttgaattttagtattatttttctattatcagtgtatgaggctctcaatttattatatatagatacaaattaatgattcacaaacactttttatttccatttcaattttgctgtgccttcactgatttgtagttatattccaccattatttgctattactgctaatgttcaaattttgatcctgttgatttaatagcatgctccctctagctctccttctcatctatctatctatacacatgcacacacacttatacacgtaagcttttctctgagcaattttattttgattcttggtggctggtaatatgcttagatcctgttgactatttcaactttgtctcatttcttcatcctatcaacacagacatattgactggcttttaactactggatttccttgggagataaaatttagatcacattttttcttaagctctagatgtcttttccattactatggtgaagttacattgactgttctgaggaaataattgaattattgaactggtattatttccttttattcttttactttggtgtctgtgtttgtatgtatggaaggttttttaatgtagtaaatccatatatagaaataacttgattttgattcagtgcttctcaaaaacctattttcaaatgtgctaaagatgtctacagatttattcaaatagagtagtttgtgaatatataaatagattgaaggtatttggactttaattaaactgatttagctagtatccttctggctatttttttgttcattttcagtgtagttgggagtcatagattccttctttctttctttataaggtcattcttatggcaaatagtacattcagttcttttattcagaccaacttgttattgaagcttgatagttgcctgacatacatgttatctgaagcaatgtctaggaaagccaaatgaggaaaggagacttatctagggtttttgatcacaggaatcatttccataatcaattcagtcaacactctcacatcacttctaggtatttgccccaaattacttggatatttatgttccctttcaagtttagttttctcatttaggaatttaccttatgtcattagttgtaaactgactatctagggctcggacaaaaataatttcaactgtaggaaaggcaagtcttccaacagatgcctacatttttcttgaagtcaagaaaaatgttcaggtattttgagcatctagggataggatttatacttgtggaattccaaactgagaaaaatgatgtaaggcattgtactttgactggaattagttaaataaaaaggatatgaggtatttggctgggaaaaggagattgttccatattataaaacctcatctaaactaacttcccaagatcgtggagaacaaaaaggaagggttggctttgaaatgtgatattaagagggttatgttgattcggaggtagtgataaagttctgttaaggtataacatatagtcccattaaatagaggataaaaataaaacaccatcacatttcatgttattaattcctatggcaacctactaggctatacctttatattctctttatgatgaaacatgaaacaataatccttttcagaaacctcttttataagtgataagaagggtttggctaactttattctgaatatgccctatatagctttcagtgctcctccagttttctctgataaaactaggaggaaaattatctgcacatcagattgaaaataatactgcatatcatttcatagtggtcaaaattttcccataccacttgatggggatgttttcccacaaggtttttgttctacaacaggagagaagactttgcctagttcttccaatatgtgcattgcttctgcttagaaaaaaacaaacttttaaattctctttgctgggttaatgactgttctatagattcccatctctaaggaatcttctttggtagtaaacactggaaaacagtcactacgaaaactcataaaatgtctagtttcctatacattagtccaacacatcagtctaattctgaatcccattgaattagcaaaggcttccggctgcagttttctaaatagactcagagccctgctgttggccaatgtgctgcaagaactggagcctgggatctaccaggacgatattctgttcagtcacagaagcaagtcggagagtggccaagacttgggctttctgctcctgcaaatctgattccatacggattggggtgccctcaaactgggagcattgagttttctatgtatggaagtaaatattttaaaagcactttgtgaaacattttctcttaacgtcggagactgcagcaacgcatgggaaggatgggaaacagggtgaagcagagaagcaggacccggcagtggcaagcactcttccctttcctgctgcctttgttctgcggggcaccctcggagcagatccgctactctattccagaagaaacggtccagggctccgtggtggggaaccttgcggaggacatgcggctgcatgttcaggatttattgacctgaaaccttagagttagtgcagagaaacaatactttaccgtgaacacggagaatgggaacatacttgtgagtgacagaatagatcgagagtcactgtcttcaaaatcctctgtgtcatacccttagagattgtagcagagaatcctctaaatgtttttcacataaatgtgatgatagaagatataaatgataacccacctcattttccccaaaatagcattgttttacaaatcaatgaactagcaattccaggcattcggtttggcctggaatctgctatagatgcagatgtagggcctcactctctccagagttaccagctcagttctaatgaacatttctctctgatgatggacaagactaaaggcaagaacgctccagaattagtgctggagaagcccctgggccaggagcaacagagctctcatctcctggtcctggaagcaatggacatgggtgacccagtcccaactggcactgctgcaattcaaattgaggtcactgatgccaacgataatgccccagtttttagccaggatgtatacaaagtcagccttagagagaatgtgcccccaggcacctctgtactaaaggtgacagccactgaccaggatgagggtgtcaatgcggagatcacctactctttcaaatccctacgagatgatattggaaatatgtttgtgctagaccatcaaaatggggaaattaaatccaaagacttaatagacttcgaatttcgtagcagttataccatgagagtagaagctaaggatggtggaggcatgaccagcgaatgtaaaattatactagaaatcctagatgagaatgacaatgccccagacgtggtttttacttcagtgtccagttctgtaactgaggacgcagaaccctggacggtgatcactctgttcaaaacacatgataaagattcgagagaaaatggggaggttacatgcctcataaacgaaagagttccttttagaatcgaatcttccgccaataatgactataagcttgtaacagatgggaccctggattgggagcggatcccggagtacaacgtcaccatcactgccactgacaagggcaagcctccgctctcatccagcacaagcctcaccctacgcattggtgaagtcaacgacaatgctccggttttccaccaagtctcctacgtggtccacgtggccgaaaacaaccttcccggagcctccatcccacaagtcagcgcctctgacctggacctagggctgaatggccaagtctcctactccatcgttaccactgacttggagctgcgggcactgtcgtcctacgtgtccgtgagcgcacagagcggggtggtggtcgcgcagcgtgccttcgaccacgagcagctgtgcgccttcgagctcacgatgcaggcccacgaccagggctcgcccgcgctcagcgccaacatgagccggcgcatgttggtgggcgacctcaatgacaatgtgccgcgggtgctgtaccccgcgctggggcccgatggctccgcactcttcgatatagtgccacgcgccgcagagtccggctacctggtgaccaaggtggtggcggtggacgcagattcgggacacaacgcttggctgtcctaccacgtgctgcaggccatcgagcccgggcttttcagcctggggctgcacacgggaacctgctggttgctgtgcgtgacggaggacagccgccgctctctgcgccgctacgcttcacctagtcttcgcagacagcctgcaggaggcactgccagacttcagtgacagtcctgtgccctctgattcccaagcaaagctgcagatttacctggtcgtggccttggccttgatttctatgctcttcttcctcgcagtgattttggcggtcgccttgcacctgcgatgctcttccagcccctctgcctggggttgctttcaccctggtctctgttctaagactagaccaggggtttttcccaactacaatgagggaactttgctttattcctgcaatctgtatgttccctcggattctagaaaaagaagatttaattttctcaccatgacaccagaaacagtccccccacaagatctttctaatgaagtttctctggtagcaagcttcactgaagagaataacaagataagctctaactctgttgctcctactcacgtgagttccaatgaatgtctttcatttacaaatggatgaggtttaattttcaaaccaatattttggcaagaaaatcttaaacatattatatctactattgcttcaggtttgtttgcccactcttaatatttcctgttcctttctgtgtgggccagtaacttcattattagctttcatgtatttttgaaacattttcaccatttttacgggagactttttttttttttggacggagtctcgctctgtggtccaggctggagtgcagtggcatgatctcggctcactgcaagctctgccttccgggttctggccattctcccgcctcagcctcccgggtagctgggactacaggcgcccgccaccacgcccggctaattttttgcatttttagtacagacggggtttcaccgtgttagccaggatggtctcgatttcctgacctcgtgatctgcccgcctcggcctcccaaagtgctgggattataggcgtgagccactgcacccggcccggagacattgtttatacacacacacacacacacacacacacacacacacacgtgtgaaaagtgggtattatgatactgctgtcattgagatattttaattgaggaataaatttttttcctgtgatgtttcttgggacatcaatatttgagtatataaggctttttctttaatccattaactataaattttgaagaaaatgcatgagaaaatggagaaaatgtgttttttttttaaaaaaaattgagattaaggtctcattatgttgcccaggctggactcaaactcttgggctacagtaatcctcccacctcaatctccagagtagctgagactacagttgcctgaaactgtgcctggcagagaaaaaagcttaaaaaaataagaacatggtaatgatttgataatattcagttacatttacttttgattcttgtaattcaagtaaactcaattttatgtctgatattttctcacagctacctatatatttcttcccaatttaaaatatattattttattttatgcctagcaaatatctttacagtataaatatttacgctcatgaaagtacgtagccagttatttcttagggagaattttttccctatattttgatgggcttccaaaagtattaccagtaattctcagtaattacaattaggtcagttacccaggaaaaggtaagtctgtaacattctttggactaccaattttcttttactaagtttcctgaacaataaatatttttgaaatataatgtattaatagaattctggagtacttccattatttccagtcaatgcaagttggaatgcttctactttatgctaaaaatattaatgtttctttttcacttgggttcttgttaagtgtgattctgataatgtatacaatcacatatcatttttaggtttccataatatcatgaaaatttgatttttaagcgttacatgtcaacaacctggtaaagtaatccttccattcaggatcattcaaggaatctatttaaaaatattttccccaaattatagctgaatcagaaagtttaaattattatattatatgatttgtcaaaaagagaaactcctagggagacatctccataataggtgtgttgggggaacagtaatctcaaagcagatgcactaacattataagattaaaatcattgtttatagaaacttccaattcatttaaaagctcattggggaaaaaaaagctcattgggaaaaaaaaaaaaagctcactaaagtttctattaaagcgaatacggtagatttccatccccttttgaagaacagtaggtggagctatttaagatataaaaacgaaatatcctttctgggagttcaagattgtgcagtaattggttaggactctgagcgccgctgttcaccaatcggggagagaaaagcggagatcctgctcgccttgcacgcgcctgaagcacaaagcagatagctaggaatgaaccatccctgggagtatgtggaaacaacggaggagctctgacttcccaactgtcccattctatgggcgaaggaactgctcctgacttcagtggttaagggcagaattgaaaataattctggaggaagataagaatgattcctgcgcgactgcaccgggactacaaagggcttgtcctgctgggaatcctcctggggactctgtgggagaccggatgcacccagatacgctattcagttccggaagagctggagaaaggctctagggtgggcgacatctccagggacctggggctggagccccgggagctcgcggagcgcggagtccgcatcatccccagaggtaggacgcagcttttcgccctgaatccgcgcagcggcagcttggtcacggcgggcaggatagaccgggaggagctctgtatgggggccatcaagtgtcaattaaatctagacattctgatggaggataaagtgaaaatatatggagtagaagtagaagtaagggacattaacgacaatgcgccttactttcgtgaaagtgaattagaaataaaaattagtgaaaatgcagccactgagatgcggttccctctaccccacgcctgggatccggatatcgggaagaactctctgcagagctacgagctcagcccgaacactcacttctccctcatcgtgcaaaatggagccgacggtagtaagtaccccgaattggtgctgaaacgcgccctggaccgcgaagaaaaggctgctcaccacctggtccttacggcctccgacgggggcgacccggtgcgcacaggcaccgcgcgcatccgcgtgatggttctggatgcgaacgacaacgcaccagcgtttgctcagcccgagtaccgcgcgagcgttccggagaatctggccttgggcacgcagctgcttgtagtcaacgctaccgaccctgacgaaggagtcaatgcggaagtgaggtattccttccggtatgtggacgacaaggcggcccaagttttcaaactagattgtaattcagggacaatatcaacaataggggagttggaccacgaggagtcaggattctaccagatggaagtgcaagcaatggataatgcaggatattctgcgcgagccaaagtcctgatcactgttctggacgtgaacgacaatgccccagaagtggtcctcacctctctcgccagctcggttcccgaaaactctcccagagggacattaattgcccttttaaatgtaaatgaccaagattctgaggaaaacggacaggtgatctgtttcatccaaggaaatctgccctttaaattagaaaaatcttacggaaattactatagtttagtcacagacatagtcttggatagggaacaggttcctagctacaacatcacagtgaccgccactgaccggggaaccccgcccctatccacggaaactcatatctcgctgaacgtggcagacaccaacgacaacccgccggtcttccctcaggcctcctattccgcttatatcccagagaacaatcccagaggagtttccctcgtctctgtgaccgcccacgaccccgactgtgaagagaacgcccagatcacttattccctggctgagaacaccatccaaggggcaagcctatcgtcctacgtgtccatcaactccgacactggggtactgtatgcgctgagctccttcgactacgagcagttccgagacttgcaagtgaaagtgatggcgcgggacaacgggcacccgcccctcagcagcaacgtgtcgttgagcctgttcgtgctggaccagaacgacaatgcgcccgagatcctgtaccccgccctccccacggacggttccactggcgtggagctggctccccgctccgcagagcccggctacctggtgaccaaggtggtggcggtggacagagactccggccagaacgcctggctgtcctaccgtctgctcaaggccagcgagccgggactcttctcggtgggtctgcacacgggcgaggtgcgcacggcgcgagccctgctggacagagacgcgctcaagcagagcctcgtagtggccgtccaggaccacggccagccccctctctccgccactgtcacgctcaccgtggccgtggccgacagcatcccccaagtcctggcggacctcggcagcctcgagtctccagctaactctgaaacctcagacctcactctgtacctggtggtagcggtggccgcggtctcctgcgtcttcctggccttcgtcatcttgctgctggcgctcaggctgcggcgctggcacaagtcacgcctgctgcaggcttcaggaggcggcttgacaggagcgccggcgtcgcactttgtgggcgtggacggggtgcaggctttcctgcagacctattcccacgaggtttccctcaccacggactcgcggaagagtcacctgatcttcccccagcccaactatgcagacatgctcgtcagccaggagagctttgaaaaaagcgagccccttttgctgtcaggtgattcggtattttctaaagacagtcatgggttaattgaggtgagtttatatcaaatcttctttcttttttttttttaattgctctgtctcccaagctggaatgcagcggtacgatcatagctcactgcagcctcaaactcctaggctcaagcaattatcccacctttgcctccggtgtaacagggactacaggtgcaagccacctactgtctgcctatctatctatctatctatctatctatctatctatctatctatctattactttcttgtacagacaggagtctcactatgttgagcaggctgatctgaaacttgggctcaggctagcctcctgcttctccctcccaaactgctgggattacaggcgtgaaccacagtgccccgcccttatcagatattcttttctggctgggcgcggtggctcacgcctgtaatcccagtactttgggaggccgaggcgggtggatcacctgaggttgggagtttgagaccagcctgaccaacatggagaaaccccgtctatactaaaaaaatacaaaattagccgggcgtggtggtgcatgtctgtaatcccagctacttgggaggctgagtcaggagaattgctttaacctgggaggtggaggttgcaatgagctgagattgtgccattgcactccagcctgggcaacaagagtgaaactctatctcaaaaaaaaaaaaaaaaaactttatcctctagtttcatccattgatgacacttgctttaatcacttattacaatcacctccaaatgaagattttataattccattgtttcttctacagttgttaattggctttctaccttgaagaagagttttatattctctatatatgtttgtttctatgattctggaagcatggttttctattttattcaatggcctgtaatctgttaatatcaattatttattttgatgctgaaattgtcccaggattggcctttgggactccctttaggctgatttctatgtcctttctgttacagcaagcttgggattatatccaagatttgtaattccaatgtacttacttctgtcagtgtaaacaaagtacgatttctggactagatgacttgggcattgtgggggaggtggaaattagaggtattctctgtttttcctgtaggatcttgcatttcttcctcttgctgcttgtctctttgtgtcgggaacaggccccccaaaatctggccataaactggccccaaaactggccataaacaaaatctctgcagcactgtgacatgttcatgatggccgtaatgcccatgctggaaggtagtgggtttaccggaatgagggcaaggaacacctggcccgcccagggcagaaaactgcttaaaggtgttcttaaaccacaaacaatagcatgagtgatctgtgccttaaggacatgcccctgctgcagataactacctcaatccatccctttatttccgcccatctcttcgtttcccataagggatacttttagttaatctaatatctatagaaatgatgctaatgactggcttgctgttaataaatatgtgggtaaatctctgttcagggctctcagctctgaaggctatgagacccctgattccccacttcacacttctaaaaaaaaaaaaatttttttttctgagcttggagaaatatatcccttagtacacttggcatttataaagcagacatcaataaatttatatatatgtgacagataccaacaacaatccagtccccttccctcataccttatttatgtacatatattttatataatagatataatttattaacaatttataaaattactttgttaatactctatatcattttctagctgaatttatcaatgataatgctcttttcccacttttatttttttcccattgaccatgcagcagttttgtgtagaccgtctgataacaactgatctgtttatctaggggggagaaatctaattcaatggaaaatataaataaaattgtgataaacttttgtaaatagagtggcttttaactacacttgagatggctagcaaattcataaagtgaatttactttctttcaaagttcagtaattctttctggccattagggatatgtccatttatactttctcagtatcccaagtcatttcatggttttaaatcattcatgaacttccaaatatagtgaatttatttcttctgcatttaaaattttatcacttaaatatacaatataccgtattgccatgacgaaaaatggtaaagactatttttcacttctgttatgcatttcattaatacgatatctgtatgtgtttccaagttagacatttcttttgcccatttcctacactaatgatactaatgatgactttgtggaatattcagaattaacaaaatgtgttttgagtgctttttttagtactggggcaaatttgcagtaatatcgcctgctttttacattaaattccccataacttttacaactatgggaaaatttctgaaacgtgcacagattccaagtgttttctgagaactttatgcttattgtagagtggttacagacactgaatgctaaagtgtattactctttgaaaagcattgcttgatttcttttggtgaattctgtaaaggtgcagggaaacataacgtcccaattattttttctttcttctttgtttgctgcctatctactttgaaagatacaatagttaaaacccagaaaagagattggaaaccccttagagaatgaaagacatccaagggctctaaaatgcggcagttgctgcttctgagaccaaaaaagggggcaaaatatagagtgtgtggttctacttgtgtgattttttgaaagaaagtatttgaatttatctaaaaatactaaatttgtatttacattagttttcaaatagaatttaataagtacagtgttctataggtaatattgagagaaatagaggacaatgaaacctctctcctccatcatcttgtatgaactaccaaaatgtttatcatatggacagttctcatatatagtcaaatagaaagaaagacataataggaaaacaaatgacttgggaaactaagctaacatggtctaattattctgacctctgctcacctaacttgatttaggaacaaatcattgagagttagagcatgaatagtcaagactgttagaccatatctcaaatatcagtgacttcaatcaactatgtttccagtttaagctgaataggctttattaaatagttgttgaatgaatggataaacaaataatgtactctggggattacctgataccaggattctgaattttcagatgtatcatagaaggatagcagctttgcaattaggtaaattgttaactgtgtcacctttagcaagttatttaatctctttgagcttcagcaaagtaggaataatcatatctaatttgaaaggtcgtggtgatggctagggctaacaaaaatctgattcacaacatgcaattaattaacagtagccatttttagtggttgaccaaaaaaaggatttatattttcaatgccagcacactcgatgttctgttgggaaaaataataatgatttttgtgtgcttctccatatggtataatggaatgatttgtggatggaaataaaactgttctaaaatttttgtgacagctggtttaaaaatcttaagtgcctaggcacattcttgattgagaagccacagttttaggccataaaagatgggggaaagatttttatatgagacaattttgtgagtgttactttttctttgtctgaaccatagtgaaatctaaacaaggatcttgtgaaacttattttaaagaagcagtttacttcaatgggatcttagataatttcaccagaaaatggatcaccgaaaccagaaggctggtgatcattatttggtttgggccatataagaattgaaactaacggcttagctttaggatttttaggacacttgttgataatttaggattcataattaacatatgtgttgattgttttctgagactaactgggcaatgggtttggatgtgtttacatttattctgattccagtcataaaattatgtcaaggactttccttgtctttttatgtgtatgacagatgtgtatgtatccatttcatctaacaagttaaagcgttcagctataatttaaaatttgtagcttcactgttttatagtacctaaaattggaatgtaatcagtcagaagacattcatccactgctttcattccagaagtattatgctttttgaagcagcaatagcataggaatgttgaggagactatactatacttttatagcatatttaatctcgtagatcacttttcaatgaattataaggctgatgacaaatgagcaaattgtatcagttttctttatgacatgtaacagagtatagctgtgatcatgaattggatagttctggtgtaaaaatctgctttatccccatataagatgtcaggttcagaaaagcaaacacatagtttcgaagagatgttgatcaaactgatgaggctaaatctcaagaaagagacacagttaccctctaatgttacactttgagttcacctttttttttttttttgagacagagtctcaatctgtcgccaagctggagtgcagtggcactatcttggctcactgcaacctctgcctcctgggttcatgctattctcctgccttagcctcccgagtagctgggactacaggcacacgccaccacacccagctaatttttgtatttttagtagagatggggtttcaccatattggccagaatggtcttgatctcttgatcttgggatgcacccaccccacctcagcctcccaaatagctgagattacaggtgtgagccaccatgcccgaccactttgagttcacttttaagaaaccatacttaatggaaaattaccagtaacagggcatactgtttaggatgcattcctaaaatattaatggcaaaagatagccagcctatggcaaagctaattggaaaaaatattttataaaggatgagacttctggataccatatgggaagggctctggttcaggaaaatgtttttaaaaaactgtcattgaagagaccatagaatcaaacaaaataatttaatctgtatgtaaaagaagttggtaccaccataatttttcttatacatgtcatataaggatctactctgtgtattgtcattgagggcagatataatttcttagttcatcattaactctctgaagtatttcacacagtagtttgtacaccttctaagtactcaatacaatgcttgagttcaattattggaaagtggtctcttggagaaaaaagaatcatagtgcaaaaccaattattttacatggacttttcctctatatctaagccctaataagaggcagctgtctgatatacatacatacatacatacatatatatatatatatatatatatatatatatatatatatatatacacacacacacacacatatatgtatatatatatttggagtaggggatggagtcttgctctgtcacccaggctggagtgcaagtggtgtgatctcagctcactgcaacctctgcctcctgggttcaagcgattctcctgcctcagcctctccagtagctgggattacaggcgcctgtcaccatgcccagctaattttttaaaatatttttagtagagacagagtttcatcaagttggccaggctgctcttgaactcctgacctcaggtgatccacctgccttggcctcccaaagtgctgggattataggcatgagccaccgcaccctgccaactgtctgacttatcttaaaaggctaaggacctggtttgtttgtcaaattttgaaaatagatgcctcagttcataagatttccatattgtgtggcaggcgcctgtaatcccagctactcaggaggctgaggcaagagaatcacttgaacccgggagacagaggttgcagtgagctgagatcacgccactgcactccagcctgggcgacatagtgagactctgacaaaaaaaaaaaaaaatccatatgtgaaaattcttagaagcttcctatacaatttcagctgaagattcagccaacagttcattctgagactgtgttccatggaaaaagtaaagcccaggcatggaagtgggaatggaaagaaagattctaagcctacaaatactcaaacatcaagaagaaataaaaataagtcatcacttcgacttcatgtgctaacatcactgaggttataaattcccaggaatattttattgcgggagcaagactgcactgctgcctttcagcttgcaaattccagtgagaaacgtctttctctctgctctcaactaactctacagaacgctgtcctctcatttcttcaggctgcagttctagagtagggactcagagtgccactgttggccagtctggaaacagagataaatgagccaatccccagacattccggcttggtggcttttctaatttcatggaatgcaaatccaagagcagacccacaacattcctattatggctcctagttctacaaattataagcaggaacggaacggatttacaggcaatgagttcagctccttcttggctggagattctataatccaagaagagtttgaaaaggggcttatttgggctggagcagcagcaactctaactgtggaaaaggtggggaatggtgctggactgacagtctgggtagaaccaaggcgactactgcctcctttcctgctatttctatcctgctgggcattctctatgatgcagatccgttattcagtcctagaggagctggccaagagtttggtggtgggaaaccttgccaaggatctgggactcagtgtcgaggacatgcccacttgaaagcttcgggttaatgctgaggaataatacttcattctaagtggggaaagtggagacttacttgtgaatgactgaatggatcaggagcagatacgccccccaattatagcttgggccataacgctttgaaatagttgaaggccaggcatggtggctcacacctgtaatcccagcactttgggaggccgaggcgagcagattacgaggtcaggagttcgagaccagcctgaccaacatagtgaaaccctgtctctactaaaaatacaaaaattactgggcatggtggtgcaggcctataatcctagctactcggggggccgaggcaggagaatcgcttgaacccgagaggcaatcgcaccactgcactccagcctgggtgacagagcaaggcgccatctcaaaaaaaatgaacaaacggtagttgaaaattctttaaatgtttttcacattaatatggagattcaggatatgaagaatcatgcaccacggttcagcaggaatgttattaagttacgtatctctgagtttacccagctggaacaagatttgcaacagaacctgcagaagatcctgatgttgagagaaattccttacaaaattatcaccttagcagcaactctatatttctctttgaagtaaaagtgaccaacagtggaaagacatatgttgatcctgtgttagagaagctgcttgactaggaaaagcagagctcccatcccttagtgctagcagccttagacggccccccaacaaagcagcatcactcaactcctgatcctattggttgaagccaatgacaaccctgtgttcatctaggatgtgtacagcgtcggccttcaggaagatgtgcatccgggcactcctgtgctgagagtgagggccaccaaccaggactagagtgtcaaggcagagatcacatatggcttcacaacccagagtacccatatctagtttggccttgatcaaatagtggagaaatgaaaactttaagtacattggacttttaaagatttttaatttccatggttttggtagcaagtgacagagagggactcattgtccagtgtacagttgagaccgaatttctagaagataatgacaatatcctagaggcgatttttacttctaattccacaatgattcccaaagattctgcaccttggacagtaatcactgtccaggatttaaatcacaagatctttaaatcacaagatctggattcgggagaaaacgaggtcacatgtctgatataagaaaatgcaccttgagaaaaatcttcctccaataattaactacatgcttgtaacaaatggggccgtggaccaggaacagacccaaggtataacatcagcatcactgccactgacagaggcaaaccaaccctctcgtccagcccaagcatcaccctactcattggcgatgccaacgacaatgctctggttttctaccaggcctcctacgtcgtccacgtggccaagaacaatcttcccaaagcctccatagtgtgcaagtagacacctccaacctagacttgggacccaacagccaagttccctattccatcgtggccagtgacctggagccacaggcgctgtgattctaggtgtccttgagcgcacagtgcgccttcgaccaagagcagccgcgagccttcaagctcacgctgcaggcccgcgaccaggactagctcgcgctcggcgtcaacgtgagcctgcgcgtgttggtggacgacctgaatgacaacgcaccgcgggtgctgtaccccagctctggagcgcaatggcttcgcgctcttggatatggtgctgcacgccgcggagcctggctacctggtcaccaaggtggtggctgtagacgcagatgtgagacacaatgcgtggctgtcctaccacgtgctgcaggccagcaagcccaggctcttcagcctggaatgcgcaccgacgaggtgctgacagctcgcacgatgggccacaggaaagcgactcgccagcgcctactggtcgcggtgcactgcggtggacagccgctcctctcgctaccgccacgtcaccaccactaccgcccctcgtcgccgacagcctgcaggagactctgccagacctcagcgatcactctgcaaagctacagcctgaatccaaaattaatttatatctggtgattgccttagctttaatttcctttttattcttcctgattgcattgtttgtgctggttttaaagtgccgaagaccccaaaatgatcctgtctgagtctttcccacggatgtctatcccgcgctaagccccaggtttctgggtaactgtagctctatgatgccatattcctaccaggtgtgtgcttctcctacgaatccagggctgagtgaacttcttttttgaatccctacccctcaggactcaatagcagtttcactgcagaaagccccttggggaaggggatgattgtgattattctaattgcttgggcagaatccactctccaaggtgaaaaattcttgatgaaactaagttcagtcacaagcaggttttcttctagcattaaatattttcagagatctcagtaaaaagcatttctagcagcaagaccaaaggcctaagatgagaaatatttggcatggtgagcttgagggacagtagtcaggcagacaagagtatcagacatgccagagcatttggggcctgtaggtaaggagcatgttttgattatatatatttgtatgtgtttgattatattttataattttactttgatattcaaattgtactgatccaaaaataagggagggacaaatcttggccattgtagtatgagagatgtaaatttacaactcagaatccctgcttatcacttctccttcagcacacaactgtttcattttctatttaagaaacttcctctcactgcaaaaagacattctggctgataaagttagcctataatttcagtaaatctaagaatatgactaatggaagttgccagacctaaactttgaaaattattgttccactgaagagcgtcttatgactgagtgttccagtctccttctcaagctgaaccttgcttttcaaaccagattaagaacactatcataagttatactgcattttatttccctacccatgtccactgcatcattctctatagtacaaagagcttgtctcgccaggcgcatctataatcttagcactttggggcgccaaggcgggtggatcacttgagcccaggagtttgagaccagcctggacagcatggcaaaaacccatctctacaaaaaaaaaaaacaaaaattaacaaggtttagtggtccatgcctgtggtctcagctacttgggaggctgaggtgtgaggatcacctgagtctggggagattgaagctgcagtgagctgtggttgcgctcctgtactccagtctgggtgacagaattagaccctgtcccaaaacaaacaaacaaataaagagcttctctccttatgacttatttaaagcttgggaaattgttccaattcaaatgctttaaatggacttgagctaaaacagaatgtggtatatgaaatgttcttataatcaggtgattgtaaaaattgatccagataatgttagcatagcattttactgaactagtagtttacaaacacttcaaaaattatagaataacatttgcatataaaattcctcatacatttccctatcagtgaattggaagcttacaatatacaatattaccaaaaagacaaaaaaaatgaaaaggaaacagttacctttggaaaacataattaggtaaaatgggtaatatggaaagtctgaaaactgaaaaaattactgataagtcaagagaaaaggaatattagtaggaaaattcataaaagtgtgtctgactactcacagcaggtttccttattggtatgtattctgtggtccatctaagctatgttaattttattttaaatgctacctgggtattggcttctaaaaggaattcagtaaatcagataatttggcatcttcaatctagattctgatgctcacctgaaaagtctgctaaggattggaaaccaagaaaagtgaagtatctcaacagatatgtgtcacttgtgtgtactggattttttttttttttttttttttttttttttttttttgagatggagtttcactcttgttgcccaggctggagtgcaatggcatgctctcggctcactgcaacctccgcctcccaggttcaagtgattctcctgcctcagcctccctagtagctaggattacaggcatgtgccaccacgcccagctaattttgtatttttagtagagacggggtttctccatgttggtcaggctagtcttgaactcccaacctcaggtgatcttccctccttggcctcccaaagtgctgggattacaggcatgagtcactgcgcccggtcgcgtactggatttatattgtgtaatactttgctctagcagtatagtaggtgagacagtgactgtgtctagtgagcaaaaggcacttatttgacacttttgactcttcctttctacttaccttatttaaaattgatttttgcatgtggcatgatgcaccagttcattgaggtaggggttgaagttatttcccatttttttcaataccatttattaaaaatattttcctctttctgttgaatttgcttggtgcctttgttgaaagtcatttcactgatatatgtagttctatttctatattcttgatcatgtttcatttgtctattcttttactaatagcacactgtctcaattattgtagctttatagtaagtcttgctacaaagtcttactacaggacaaagcttgtaggatttttgaatgggatggcattgcatctatacctttatcagggaaagagggaaggagggaggaggatcatcttaacaatattgacacttcaaatccatgaacatggtatatatttccatttaattaggtctttaatttctctcagctatgttgtatagttttcagtgtagagaggtcatgtatatttctcattaaattgtccctacatatttgatgttttctaatgttattgtaaatagtatttttaaaattgtatcttctaattgttcatttctagtttacagaaaaatgaaaaactatgtttttatgtattctatatgcttttgaaaagtaagaggtgcaaagtgctctattcttacactatattgtgtgagaatataagtcgaaaccactctgcataagttcaggcttccattctcttcagtttgtaggttgagagaacccatccagaaacagtaaacattggtgtctgcccaagtctggtcctgggtggttcattcattcatttacataacaaatatttattaactgtctgctatatgcaaggcactgacctatggactaaggatgcagcaatgaacaaggcatatatgattcctgagttaatgggccctattctaatacatgatattttacaggtctgataaaagccaacaaggagaaatacaaaagcactaagagaaagcttatagtagggaagcttcgcctaatctgaaggtcaaggaaggctttctttttttcggaaagtgatatttagagagatgaatagattaataggatgagtagaagttatctaggtaacaaggaaagtaaaaaagaaattgtcaggcagaggaaatagcatgtgtaaagatctttttaaaaaataaaaggtgtgactcaagcaatttaaaagggctagggaggctagaaacagaaaataaatagatgaaactaataaggcagggagagccttgtaaatcacacttaaaattctggattttgttctaaatacccttgtacttaggagctattaaaatattttaaacaaggcagtgacaagatatttgaattattaagcttactctggctgctatatggagaattgatttatgagggttataaatagaaataggaagataagataggagactatggcaatattcctggtaagaaatggaagaagagctggcttggattaaaggggaggcagtggatgtagaaataaatggatgaattatagatatatttaggaaatgggttcaataagacttaataatggaataggtggaatataaatttcatgagggcagggggtgttttgtttattattatattcctaggtgtctgaaaatattgttgtgttgcctggcaagtggtagatcttcagtgaaatattattaactgaataaatacaatggataaatggggagcagggattaagagtgattcctgggtttccacattaaggaactggatggacaaagctaccatttgatgagaatggaagactaaagaatgatagatttaagagaaatcgagttgagttccagccatgttcatttgaaggatctgagaaacagtgcagatattcagtgtgtgattagacatatggtcatcattcttttttttttttgagatggagtctcgctctgtcacccaggctggagtgcagtggccctatctctgctcactgcaatctctgcctcccaggttcaagtgattcttctgcctcagcctcctgagtagctgggactacaggcgtgcaccaccacgcctggctaatttttgtatttttagtacaagacagcatttcaccatattggccaggctggtctcgaactctgatctgcccgcctcggcctcccaaagtgtggggattacaggcgtgagccaccgcgcccagccggttaccattcttttactctgagttcttccattgtgatcatctagtcagatgggtagatccttataaggctgagcataataagcttcctgatagctctacactggtatgttttggggttcatggctgagctacttttgtgttttatttatcttcctgatctctttttcactgtaagaaacatccagcacccagggaaatttgctgtctaattcatactccactcttcagactagtcctagtgttcagttttgttttgttttttttctgtgtctggaattctattaaaatgtgtcaggctgttttaatttttgttgtttaattttctttcacatgattatatgtgctccatggatttttttgtttgtttgttttttgtttttgtttttgtttaagcggggtcttgctcttgtcgcgcaggctggagtgcaatggcttgatctcggctcactgcaacctccgcctcccgggttcaagtgattcttctgtctcagcctcccaagtagctgggactacaggcacatgccaccacacccggctaatttttgtatttttagtagagacgggtttcatcatattggtcaggctggtctcaaactcctgaccctggtgatctgcccacctcggcctcccaaagtgctgggattacaggcgtgagccaccgcacccggaggaaatttttaacctcagtttttcttcaccatctgtaaaactgcatagaaggaatgtttaggataaaagatgcataacaatcataacaaaattgttgggttttaatgttatgagtacacttggaggattctatgtccacacataccttaaacatcctatagagtccttagcattttaaagttgaaaccaacagtatgaatgatggtagaattttcccccccaggaagttagaactgttccatatcttgatagagggatgggttataaggatgtacacattttccaaaactcattgaacttaagagtcttgcatgtgactgtatataaattatactttaattgaaaataaatttaagaaaataaaattggctgggcgtggtggctcacgcctgtaatcccagtgctttgggaggccgaggtgggtgaatcatctgaggtcaggagttcgagaccagcctggccaacatggtgaaactctgtctccactaaaaatacaaaaattagctgggcatggtggcggacacctataatcccagctactcgggaggctgaggcatgagaatcgcttgaacccaggaggtggaggttgcagtgagccaagatcatgccattgctctccagcctgggcaacatgaacgaaatgccatcttaaaaaaaaaaaattaaaagaaaagaaaattagcctcccccaccctcactatacctcagactcacccctgaaagatcactactattcatccctggttatgtacacttacaaacattttctgtgtgtatgcgaatgtatgtgtggggttttctttgcacaacaggatcattttacagtatatatactgttgtgcaacttgctctttccacttaatatctcaaggaatcttttctttgaatctttatagccatgtacctcaatcttagtagttttctttattttatttttgaataggaaatacatttacatggttttaaaaatcaaaacaatatactatgtatatattgagaagtctgacttccatccctatcctactcctattccacccttgcttcctcctgtcccctgtaggtaaacattttataactttattaagcatcctgtcagcatttcttatgcaaatatgtacatatatttttatttccccattttttttacaaaaagataaaatactatacaccactttatatcttcctttcttcacattatatcctttaaaaatatttccatattggccgggcgcggtggctcacgcctgtaatcgcagcactttgggaggccgaggcgggaggatcacgaggtcaggagatcgagaccatcctggctaacacggtgaaaccccgtctgtactaaaaatacaaaaaaaaaaattagccaggcgtgatggcgggcgcctgtagtcccagctactctggaggctgaggcaggagaatggcgtgaacctgggaggcggagcttgcagtgagccgagatcgtgccactgcactccagcctgggcgacagagcaagactgcaactcaaaaaaacaaacaaacaaacaaaaaagaacttccatattaatatatagaaagctgttttttttaacagttgcttagcattcctttggattattaaccagtctcataaatgagcgctattgaatagccctgtacctacatcagtttttacatatgcagtatatctttgggatgaattcccagaaatggaattgaaattgctgggtcaaagaggaaataggtgtaattttcttaggtattttcacaagaagtgttaattctaactttctgttttgaaatgatttcaaattttcaaaggagttgcaagaattgtacaaagaactgtatctccttcacccggatgcaccgggtgaattatatgtattatataattgtatctgtaggccaggtgcagtggctcactcctgtaatcccagcactttgggaggctgaggcaggtggattacttgaggccaggagttcaagaccagcctggccaacatgataaaactccatctctactaaaaatacaaaaattagccaggcctggtaccccatgcctaagggtgaggcatgagaaatgcttgaacctgggaggcggaggttgcagtgagccgagatcgcaccactgcactccagcctgggcgacagagcaagactctgtctcaaaaaaaaaaaaaaaaaaagtaaaaaagttttttaaaaagatgtatctatatatacatatttacatacacacccaagtgtgtatgtatatatgtttgtgtgtatgtacacaaacacattatttttatatgatatgatttttttatgacatgattatttttatgacatttgagagtaagttgtagaaattatgtttctttattcctaaatacctcattgtgtatttcctaacaaggacattcttttatataattaaattttaataataaaaatcagaaaatttaacatcaatgcaatataattatttagcctatagtccatatttaaattctaccataccttatagtatattttactatacctcatagtaattttttttagtccaaaatatcacacattgcatttagttgccatgtctcttttttttttttttttttgagacagggtctcactctttcgcccaggctggaatgcagtggtatgatcttggctcactgcaacctccgcctcccaggttcaaatgattctcctgccttagcctcctgagtagctgggactacaggcatgtgccaccacactcccaccacacccagctaatttttgtatttttagtagagacaaggtttcactatgttggccaggctagtcttgaactcctgacctcaagtgatctgcccacctcagctaagtgctgggattacaggcgtgagccaccatgtgtggcctagttgccatgtctctttaatctactttaatctgaaacagttcctcagccttgtttgtttatatgaaactgacatttgtaaagactagaagccatttgtcttgtataatgcctttaatttatatttgttttatgtttcctcgtgattttatatatagagtttgtttgtttgtttgtctgtttgtttgttttgagatggagtctcattcttgtcacccaggctggaatgcagtggcgcagtctcggctcactgcaacttctgcctcccaggttcaagcaattctcctgcctcagcctcctgagtagctgggattacagatgcctgccaccatgcctggctaatttttgtacttttagtagaaacggggttttgccatgttgcccaggatggtctccaactcctgacctcaggtgatccgcccgccttggcctcccaaagtgccgggattacaggcatgagccaccgtgcccggacctcatgattgtatttatttatttatttaatattattattattatttttttttttttgagatggggtcttgctctgtcacccaggctggtgtgcagtggtgcgatatcggctcactgcaaccgctgcctcccagattcaagcaattctcctacctcagcctcccaagtagctgggattacaggcatgtgccaccacacccggctaatttttttgtattttttttagtagagacgaggtttcaccatattggccaggctggtctcgaactcctgaccttgtgatccacccaccttgacctcccaaagtgttgggattacaggcgtgagccaccacacccagccttatgattgtatttagactagacatttttttggtagtatattatttagccattgctgtgtaacaaattatcccaaaacttagtggcttaaaagaagcatttattatctcataaattttgtggatcaggactgggtatagctttgctgagtgcctctgcctcaaagtcttacaaggcagcaattaaagtgtcacctaaggctattgtcttatctgaagggtcaacagaggatggatccgcttctaatctctctcacatagttaatggcaaaattaagttccttgtggattgttagactaagggttccagttccttgctggttgttagcttgaggtctacctcagttccttgccatgtggacctccatagggcaaccagcttctgttagagcaagtaaaggagagtgccagagagggcaaatgtgatgaaagccacaatctttttataaacctaattttgaaagtgacatacaaggctaggcatggtggctcaaacctgtaattccagcactctgagaggccaaggagggtggactgcttgagcccaggagttcaagaccagcctgggtaacatgacaaaaccctgcctctactaaaaatacaaaaattagctggtctggtggtgcatgcctatagtcccagctactcaggaggctgaggccagagaattgcttgaacccaggaggcggaggttacagtgagccgagatcacaccactccactccagcctaggccacagaatgaaaccctgtcaagaaagaaaggaaggaacaagggagggagggaggaaggaagggaggtagggaggcagggaaagaccgagaaagtgacataccatcatttttgctgtagtttgttcattagaagcaaaatcacttggtccagcccacactctggggagatgattttctaactccatttgtaataacttattctacttttattagttggcattatacagtaagaaagagctttcttttctcttcttatttattcatatatggctcatgtgttttttccaatgagttatattctattactaacattttttattttgacctcaaattgttttagatgttaccaataagaacctcttcaagctggttcttgtgtccttttgccataactctctcattttcttgaaccctttcttactttctgatataagaaaatattagagactcatactttccttgttccagttctgagatgaaccatttatccaaaagccttgcttcattttagtagggaatagtatttagaaactaagatctgggtgtgaggtatgctcactgctaatgggctgtcactgtttctaggccttgtcagcagacggagctaggaaaaacacacataaacacacccatatttatatttgtacacacactccctcaaaatcgtgagttcatattgatacctccagttctggttcttcctagccttccccctttccatctttgtatttttattttccaacagtaagaaccctggctcccagtgctatgaatatatttactcatttgctccatccactgcactccagcctaggccacagaatgaaaccctgtcaagaaagaaaggaaggaatgagggagggagggagagaggaagagagagaaggaagaaggaagggagggagggaaaactgagaaagtaacataccatcatttttgctgtagtttgttcataagaagcaaaatcacttggtccagcccacactctggggagatgattttctaactccatttgtaataatttattccacttttattagttggcattatacagtaagaaagagctgctgaagatttgcttgcaattggttgtctttaaactgagggtatattgtcaaagtactgtgctgaaaagttacctgtagtatagttatgtgattcattaaaataaagtttgtttctattatgtgcagttttagagttttgccacactctggttgattagtatattttctgttgcttttttgttttgttttgttttgttttgtttttgagatagggtctcgctatgtcacccaggctggagtccagtggtacaatcacagctcactgcagcctcaacctcgtgcacttaagcgatcctcccacctcagcctcccaaatagctggggctgcaagtgcacaccaccatgactggctaattttttaattatttatttatttatttatttattttagagatggggtctcactatgtttccccaggctgaccctgaactcctggggtcaagtgatcctcctgccttagcctccaagtgctggtattacaggcataagccaccacacctagcctagtattcttttttgaatatgtaaaacattaacataaagtcaaaactattaaaaaaaggtgtactcagaaaattgtcattcctcccctataccttctgcctcattcacaccacactctgtagataatcgatttcattagtttgtggtttatcctcactgtgtttctttttgcaaaacgcaaaaacaaaacctatacatatttatattttcttatgtcctcttctttcttacacaaaaggtaacacactatgtaggtagtcctggctttgaacagtttcactataaaaatatttgttactacagcttaaataacataagtctcctaaaaataattcaaattttagttaccatggtatattaactttgagtagttccataaaggacaaacttggctgctagcccttcagtccacagagcactttgaaaataacagatgagcaaaataatgtggccaatcacatgacttctttcaaagtatgtcagtgatcagtcactgtgtgcctataatttagttcatgcacagacagcaaagcatgtagttgtgttgccttccagtgataaacccacataacattttagaaaaatgtattaagaattggccagcaaagataaaagtgcagcaaagaaacaaaagtgataatgttttcagtgaaatttgaattgaacataaatggagttatagaagaaatagctgaccatgggaatgttcacactgctactttcaagaatctctagaagggcagctaaaggagcttagtgaaggtgaatttattgacatgaatgagaaaagtaattgtgatgaaaaggatgaagatgtcccagagaaagtaatgccagcaaaaacttcacattaaaggaactctcagatatttcaaagcattgaaacctccaagaataaataaaatgttggaagttgatccaaacttagaaaggagtatggcaacttgtcaagatgaagaaaaggtgcttattcctttttatttatttatttagagacagagtttcactcttgttgcccaggctggagtgcaatggcatgatctcagctcaccgcaacctccacctcctggattcaggcagttctcctgcctcagcctcccaagtagctgagattacaggcatgtgccaccacgcccggctaattttgtatttttagtagagacagggtttctccatgttggtcaggctggtctcgaacccccaacctcaggtgatctgcccacctcggcctcccaaaacactgggattacaggcatgagccaccatgctccacctgcttattccatattatatgttataggatgaaaagaggccaaactaatcttgacatgttttttacaaggaaataatcctccatggttctaatttttttttttttttttttttttttttttgagacagagtcgcgctctgtcacccaggctggagtgcagtggcacgatcttggctcactgctagcaccgcctcccgggttcacgccattctcctgcctcagcctcccgagtagctgggactacaggcgccggccaccacgcctggctaattttttaaaaaatatttttagtagagacggggtttcaccgtgttagccaggatggtctcgatctcctgacctcgtgatccgcccgcctcggcctcccaaagtgctgggattacaggcttgagccactgcgcccggtgggtctaatgttttaaattacactgtgttaaataaatattagtttgttggttttttttttagtttttttatttctctacaaatttacaaccaataagagtttttaatgctttgacaaaaaatgttaaaggtcatagtacaatcgcatttcttcccattgattattaacatcactttacatagtttcatcttgcattagcaattttgtgtgtgtgtttgtggttttaaggagcggagagtttaataggcaagaaggaagggagaagacagaaggaaggagctcccccttacagagacagagggagcggggctccaaaagaggaggtccccatctaccgcggataccagccaggtatatatgcagaggctggtggaggtgatgtctgatttgcatagggctcaggggattggtttgaccaggcatatcattcacgtagcccgagaaaaagctggccctcccaccccagccttttaatatgcaaacgtagggcgccatggatgttctaaacacgtggagatatgtggggggcagccatgtggccaggaacttgtggggcaagggcaagaaggctgtgggaatcgccaagttgaatggacctagtttctaatggcctgcatttgcatatcaaaggttgctggcctggctcctagagccggggctttaaaagaaacttttccggagatgctttaaaaaatgaaaacttcccaaggaccccttttcctgtctatctgcataaaataatttcttttattatttatttatttatttatttatttatttatttatttatttatttatttattttgagacggagtctcgctctgtcgcccaggctggagtgcagtggcgcgatctcagctcactgcaagctccgcctctcgggttcatgccattctcctgcctcagcctcccgagtagctgggactacaggcgcccaccaccacgtccggctaattttttgtattttcagtagagacgggatttcaccgtgttagccaggatggtctccatctcctgacctcctgatccgcccgcctcggcctcctaaagtgctgggattacagaataatttcttaataactcctaccacattcctccctgtggcgatatcaaactaactgctgttaggaggctttgggcgaccattgcttctggctacttcctgctgaaaaggggcgtctaatggagaacagcagctagggctcctcctggggttgatctaagggtcctcggaagaatggcgtccatgtgtggttcagtttacagcaccgtttggagtttgattgcttctaggcgagaagaaacaattcaagttatagtattgagtatacagagtccaaatatcaatacaagacatataagcaagagagtgcttaataaaggggttaaccaattccataaagaagactggaagtaattaaagagggattgtagccactcggggctgaagcccacattttccctgagcctgtcaataattttgatttgatttttaagtccctgtagatttgcctcttctttactacaggtgttaatcccaaagaagcatgtttcatttaaaaatgcattactggccaggcgtggtggctcgcgcctgtaatcccagcactttgggaggctgaggcgggagcatcatgaggtcaggagtttgagaccagcctggcctacatggcaaaaccccatctctactaaaaatacaaaaaattagccatcgtggtagtgggcgcctgtaatcccagctaattgggaggctgaggcaggagaatcgcttgaacccgggaggcagaggttgcagtgagccgagatcgcaccactgcactccagcctgggcaacagagcaaaactccatctcaaaacaaaacaaacaaacaaacaaacaaaaactgcattactaaatccaataaaaagtcctagtagactcagtgatagtaaaactttcatgcttcctttttgccagtaactattatccctgctataaggatactaattaagcaaaatacgacagcaatggaaactctgtccaatatttcagttagaaggtgctaccatggataaccctattgcaaatagtagagtgaggaaagcagttcccacaaatgtggtgtggtaggtaatttccatctaaaattttacttgccaacatatagaattcccctctgtgggcctacgaagttccttggttttattttcccaaacaaagaaacctccgggttacaggtaccttacttactttcattacctggcacaatttgcaaaataattgcccagaactagcatattgattcacattttcacattacccatccctttttcccccccaccaagctgcagaagatcaccacttgattcacaggaataagcagggccagggttagtctaaaatgtaggcaaaaagcttaaaaacaattaatgagactagggtttaatgacaaatgtatgataagctttggagcaaaatttttctctccagtcctcatttttggtaaaaactaattatgaatgaactttaatcttatacttggcctgattatttgcatgaagtgcagcaagaatggttatttctacataggacttttggattggctttgatgaaacactgttccacaaggaatttcagattagacttttaaagctgagcccagacatgggtttgtatcctctaatacctgtgagttgggttatcctctcctcttgaggtcccaagataaactcagagcttccagacctgttagaaagtgacattcttcactgaccacaggttaggaaccctgtgtggggactgtgtagacaaggtgtgaggccagttctccccaaggggcttttattggctctgcatgtcaagcttgattccttaaagggaaacacaccctttcagttaaagccttggcaaaataaccggtttttccaattgtgttctgttgacaaagaaaaatggattcttgctgcactgatgcgaacaactatattgccgtaagttaagagtacttacagatagtctccaaattttagaggaaccaggcagagaaaaatgaacatgctccaaattttgttcacagtagtataccttacttgattattaaaggccataaatagtttaaaataagtttcctttcccagtccatgcaccaaaatgatacggctctgatgagtggaggaacaacagggttcctggtcctcatgctggtttagataaaatgacacagacacatgtggagtggttttaaggagtggagagtttaataagcaagaaggaagggagaagagagaaggaagacgctcccccttgcagagacggagcgggggttccaaagctgaaagaggaggtcccccacattaacaatttttaaaataccgtacaactgcagaaaatgaggactgcctgtacatactgtttgacactttgtttttttttttaacttatcaactttattttgtttgtttgttttggttttgggtttttgtttgtttgtttgttttggagacgagtctcactctgtcagccaggctggagtgcagtggcacaatcccagctcactgcaacctccacctctcgggttcaagcaattctactgcctcagcctcccgagtagctgggattacaggtattcgccaccacatccagctattggttttggtttttgagacagggtcttgctgtgtcacacaggctggagtgcagtggtgtgatctcagctcactgcaacctctgcctcccaggctcaagtgatcctcccacctcagccttccaagtagctgggactacaggcatgcacaccatgcgcagctaattttttctattttttgtggagacggggtctcactatgttgcttaggttggtcacaaattcacagcctcaagcagtcctcctgcctcaccctcccaaagtgctgggattacaggcatgagccaccacatccagccttaccagctatattgaagtataatttatataacataaaatttgccttttaaaattatacagtgcaatgcattttgacaattgtttacatctgtgtaaccaccatgcaatcaaaatatagaacatttctataaccttcaaaagttccctcatgcccctttgcaatcaattcactacttctccagctccaggcaacaactggtctgcttcctgtcactataaattagtgttgcctctttcagaatttcatctaaatggaatcctataacatatactattttgtatccatcttcttttactccaaagttcttgaaattcattcatgttcctgtgtgtatcagcagcgtgttccatttgattgttgagcagtattgcattgtgtggatatatcacaatgtgttcattcattcaactgttggtggacatttgagttgtgtccagtttagtgctattctgaattaaagtgatgtgaacaatcatgtacaagtatttttgtaggcatattttttttatttctcttggataaataccccaaaacagaattgttttgggggtcatatgaaatgggaagtatatgcttaactttataagaagctgccaaactatttttcaaaatggtaatatcactttacattttcatgagcaatgcataaagcgttccgcttgctacattttctcaccaatgcttcctattgtcaattttttaaattttagcaattctagtgggtgtgtgatactatctcattgaagtttcaactgtttttccctgttgactagagacactgagcaacttttcatgtgttgtctatttgtatatcttcttgaagcattcgttcatctttaactgagctgaacgccttcttaaaattgagctatgggagttttaaaatatatccttgtagctgggcgtgatggcaggtgcctgtaatcccagctactcaggaggctgagacaggagaatcgcttgaacccaggaggcggaggttgcagtgagccgagactgcaccactgcactccagcctgggcaacagagtgagacttcatctaaaaaataataattatacatgtaattatatatgatttttatatatgtaatatatatattcttgatgtgagctctttgtcacatacatattttgtggatattttatcccagactatgacttgtcttttcattttcttagttgtgtcttttgaagagcagaagatgtaattttgataaagcccaatttattttttcttttatagtttgtatttcttatgtcctattcaaaaactccttgcctactgaaaacttatgatgattttctcctatattttcttttagaagttttatagttttaccatttataatttggtctatgaatccttttgagttgatgtttatgtatggtgtatggtgtgaggtaacaatgaagattcatatttttttccaaaggaatatccaattgtctctttggaaaaatatgctgagaaggctatcttttccccaccaaataatcttagcaccttaatcaaaaatcatttggccatggacatatgtaggtgtgggttttttctgggctctctgtgttagatggatagatagacagatacagatatataactgtgtttacacatatgtaactgtaaacacagttatatatctatatatccaccaacagttgaatgagaataaactattgttataagcatatatacacattgtatatatatgtgtacatatacatattgcatatgtatgtatacatatatacacacaaagtatatatatgtatgtatacatatatacacacttaaagtaatggcctccagttcgatccaagttgctgcaaaggacattatttcatgccttttcgtggctgagtaatattccatggtgtatatatatatatgtgtgtgtgtatatatatgtattatgtatatatatatgtgtgtgtgtgtgtgtgtgtgtatatatatatatgtgtatatatatataccacattttctttatccactcattagtcgatggggacttaggttggtttcacatttttgcaattgtgaattgtgctgctataaacatatgtgtccaagtgtctttttcatataattacttattttcctttgggtagatacccaatagtgggattgctggattgaatggtagatctgttttttgctctttagagaatctccatactgttttccatagaggttgtactaatttatattcccagcagcaatgtgtaagtgttctcttttccccacatccacaccaacatctattgttttttgactttttaataatggccattcttgcaggaccaaggtggtagctcgttgtggttttaatttgcattttcctgatgattagcgatgttgagcattttttcatatgtttgtgggccatttgtataccttcttttgagaaatggctatttgtgtcctttgcctactttttaatgggattgtgttttatttttcttggtgatttgttagttccttgtagattctggatactagtcctttgtcagatgtgtactttgcaaagataatattttggatgttatatttccattataatttagttcaaagtattttctaatacaccttgcaatttcttctttgacccatggattattttaaagtttgttattttgtttgtttattttgagacagagtttcactttttttgcccaggctggagtgcagtggcacaatcccggctcccagattcaagcgattctcctgcctcagcctcccaagtagctgggattacaggtgcccaccaccacacccagctaatttttttttcttttttttttgagacagagttttgctcttgttgcccaggctggagtgcaatggcacgatctcggctcactgcaacctctgcctcctgggttccagcaattctcctgcctcaacctcctgagtagctgggattccaggcatatgccaccacgccaggctaattttgtatttttaatagagacggggtttcttcatgttggtcaggcgggtcttgaactcccgacctcaggtgatctgcccgccttggcctcccaaaatgctgggattacaggcatgagccactgcacccagtccaattttttgtatttttagtagagatggggtttcatcatgttggccaggctggtcttgaactcctgacctcaggtgatccgcctgcctcggcctcccaaagtgcagggattacaggtatgagccaccatgaccagcctaaagtgtattgtttagtcaccaaatatgtaagtattacccaaatatatttgtcactgatttctaatttaattgtattgtgatccaaaaatatacattgtatagtttctattcttttaaattcgttaacatttcttttatggcacagaatatggtctatcttggtgagtgttgcttacacacaactgtgtaactgaaaactgtgtattctgcttctcgtggttgttgtatcctataattgtcaactagatcaagttagtaagagtgttgttcagtgatcttttcttcttcagtgtttactgtatttgctaatcccatccagtgaagtttccatttcatatattgtatttttcacttttagaagttccatttgactctttcatttccatcctcaattatcttcatatttttctttaaatttttgagcacatttataatggaggttttaaagtccttgtctgctaattttgtcacctctgtaattcctatgatgattttcttcctggcttggggtcataatttgttgcttatttgcatgtctaataatgtttttattggacagcagacattgtaaatgttatatttttgagtgtttggattttgtctttctttaagaactattgcagtttgttttggaaggctattatgttttttgcagatcaggttgatcttttcaaggcttgtttttaagctttgttaggacaggtctgtagtaacttttgccttgggctaatttagacctaccacttaattctgacttttttgattaatctgagtgttcagcagggtctctttattatggctaaatgaaattcaaacattttccagccctatgtgaccatcaagaattcagctaatagctccctggcagttcttcgcccagctgcagaaaagtgtcagtgcactctatgtatgctcagattattatttagccaaagacttggggatccatattaatattcctggagttctttgtgtagctccattctctttagtactctatcccataaattctggctgcctcaatctcctaatctccccaaactctaatatctattcctcaactcagcaaaaccatggtgttattcttggatttcccctttcctgccccacagtctgaaagttgtctccaggcaaaaaaaatggagatcctagtttgcggatcctcatttccttctccttttttttttttttttttttttttttttgagatggagtctcgctctgtcacccaggctggagtgacgtggcgtgatctcggcttactagaaactccggctcccgggttcatgccattctcctgcctcagcctcccgagtagctgggactacaggtgcctgccaccatgcccggctaattttttgtattttgtttagtagagacggggtttcaccgtgttagccaggatggtctggatgacctcgtgatctgctcacctcggcctccaaaagtgctgggattacaggcatgagccaccgcgcccggcctgcttctcttctcttatgggttagaatcctgcactgtcttttgaacaaatgtctaaaagcttttatcacacattttgatccacttcccagttgttatagtggtatatctggtttcacatgactgaaaggaaaagttttcaccttgctttttgtactaataatatatcctggaaatcattctatataaatttatagaaatcttcatttttaaaatagcttcataaaactccattgtaaaaaccaggtgcagtggctcatgcttgtaatcccacactttgggaggccaaggcgggtggatcacctgaggtcaggagttcaaggccagcctggccaacatggtgaaactccgtctctactaaaaatacaaaaattagctgggtgtggtggtgggcgcctgtagtcccagctacttggaaggctgaggcaggagaattgcttgatttcaggaggcggagattgcagtgagctgagattgcgccactgcactccagcctgggctacagagcgagactccgtctaaaaaaaaaaaaaagcaaaaaaaaaaactccattgtatgtgcacatatcattatctgttcaacccatctatgacttgtcatttaggtagtttccatccaatatttttgcaatataaaaaatgctaatgaagaacctgagatatatatatatctatatatatagatatatatgtttgttgttgttgttgttatttttgaagtatgtacgtataataaattcctaatagtgtgattgctgcatcataaggtaaaggcatatgtagttttgttaaatatagctattccccatcttgcattcctacaaatagatgagaatgtccattgtcccatagtctcctttgcagagtatattgtcaagctttttaattgttgccaacctgatgggtaaaaagatatctccaaataattttaattaaaatttctcttattatgaatgaggttaaatagtttttcatatgtttaaaagccagtttatatctttttgtttttttagagacaggaatcttgttctgttgcccaggccaaattgcagtgatgcagtcatagctcactgtagcctcgcactcctgggctcaagcaatcctcctaccttagcctcccaagtagctaggactacagatggatgccaccatgtccagctaatttttttatttttttgtagagatgtgaggtctcactatgttgcccaggcttgtcttgaactactggcttcaagtgatcctcccacctcagcctcccaaagtgctaagattacagccatgaaccaccacaaatgaccctatatatttttttgaattgtctgttcatgtcttattttcatttttctagtagttttttttttaagtgttttagcctaaatttgtaaaaagtttaggggatatatgaagggactctaaatgtttatgaagaaatttaattaaaagataaaaataaaaatataagctttatttttcaacatgagctccatcaagttcaaggcacttttgtaagcaatgatactagccatttagttcacccctaaagaactgagagtcctgggaatttagccatgtcaatgcagtattttttatattggttactgaagaaaaaatgggtgccctttaaagttgtaagattaggaacaaaaacaagtcagaagaagccaaatcagcactgaaaggtgggcacttaatgattacccaagaaaactctcaccaaattgcccttgcttcatgagaggaatgagcgggagcattgtcgtggtcaggaaggattctggggaagttttcccaggcattttttctgctgaagctttggtaactttctcaaaacactctcataataatcagatcttatcactctttggccctccaggaagtcaaccagcaaaatgctttgaacatcccaaaaaagcgcttgccatgacatttgctcttgaccagtctgcttttgcattggtcaaatgccaccacttccacctcttgtgctttgttttcaggatcagactggtaaagtcatgtttcatctcttgttacagtttttttttttttaagaaacccttcaggatcttgatcacatttgtttaaaatttcaactgaggctgggcccagtggctcatgcctgtaatcccagcactttgggaggccgaggcgggcaaatcacgaggtcaggatttcgagtccatcctggctaacatggtgaaaccccatctctactaaaaatacaaaaaattagccgggcatggtggcaggcacctgtagtcccagctactcgggagggtgaggcaggagaacggcatgaacccaggagacggagcttgcagtgagctgatatcatgccactgcactccagcctgggcaacagagtgagactccagctcaaaaaaaaaatcaagtgaaaactctggtcttaaactgcagctgatctattttatttttattttttttcagacacagccttgctctgttacccaggctggagtgcagtggcaccatcatggctcaatgcagccttggcctcgtgagctcaagcaatcttcccacctcaggctcccaagtagctgggactacaggcacatgctaccatgcctggataatttttttgcagctaatctagatgtaatggttttggcacccatctaatggaaagtttgctcaactttaatttttcagtcagaattgtgtaagctgaaccgagatgtctatggtgttggctattgtttctgctgttaattgtaggtcttctttaattagagcacagacaagatcattttttttcctcccaaattgatgtagatggtcttttgctgtgggcttcatcttcaacattgtctcatcccttcttaaaacaagctagctacttgtaaactgccgttttctttggagcattgtctccataaacttttcacaaaacatcagtgatttcaccgttcttccactcaagcttcatcataaatttgatgtctgttcttgtttccattttagcagaattcatgttactctgataggggctcttttcaaactgttatcttattcttcttagtgcctcaaactagatcctattcagacatggtataacaagttagtatgggtttattttggtgcaagaaatattttgaaatccacacatttttttcataatatgcattttccatgaagtttttgaaaactccttgtattaggaatattagtcctttgtccagtaaacagactgcaaatattttctcacagctcatcatttaccttttggcatttttttgcaatgcaatttttttccctttgtttttgttttttgtgtaatgaatcaatgttttcttttttttttttttttagaccaagtctcactctgtcacacaggctggagtacaatggtgcaatctcagctcactgcaacctctgcctcccaggttcaagtgattctcatctctcagcctcccaagtagctgggattacaggcacatgccaccatgcctggctaatttttgtatttttagtagagatggggtttcaccatgttggccaggctggtctcgaactcttgacctcaagtgatccactcacctcggcctcccacagtgctgggattagagacgtaagccactgcccccggccaaatcaacgttttcttatattgcatttaggttttaagtcatagttagaaagcctttccccacacctaggttatagaaacattcattacttttttcttccagtgctagtacttgcatggtttttggtttccacatttagatccctgatctaattggagtttattcttttgtgtgctgagatatggatctgattatatcttttttcccaaatggctatccagttgtcccaatgccatttattaagcacttcatctttgtcccagtgatttgagatagcatctttatcatgtaccaaacttctatagtgccagaagatttttattttttttagacagggtctggctctgttgcccaggctggagtgtagtggcacaatcccagctcgctgcaacctccgcctcacatgctcaagtgcccgcacctcagcctctcaagtagctgggactacaggcacatgccaccacaccaggctgatttttatatttttttgtagaatgagatttcaccatgttgcccaggctggtctcaaactcctgagctcaagaaatccgcccacctcagcctcccaaaatgctaggattacaagcatgagccaccacacccggctgccagaaaattttaatgatcagaaaaccacaattctttcttcctctgttatatgttgaagtaaaatacttcatttagaaaactaagccgggcacagtggctcacacctgtaatcccagcactttgggaggttgaggcaggcagatcacctgaggttaggagtttgagaccagcctggccaacatggtgaaaccctgtctctgctaaaaatagaaaaatttgctgggcatggtggcgggtgcctgtaattccagctacttgggaggatgaggtaggagaattgcctgaacctgggaggcagaggttgtggtgagccgagaccacgccattgcaccccagcctgggcaacaagagcaacggtaaactccatctcaaaaaaaaaaaaaaaaaaagaaagaaaaaagaaataactcagccatacaaggctacccatttggtgagaactaataataagttagatagcaaggtaatagcaaaatgtgggtgcaaaattaaagcaagttatttctgaggagaatgtaggtctcatggaagattttcatgtggacaaatttagtaaattttttgcaggtagtttcctgacatatttaacatttgtgatatagtaaacaataagaaggtactaaaggctgggcgcggtggctcacgcctgtaatcccagcactttgggaggccgaggtgggcggatcacaaggtcaggagatcaagaccatcctggctaacacggtgaaaccccgtctctactaaaaatataaaaagttagctgggcgtggtggcgggtgcctgtagtcccagctactcgggaggctgaggcaggagaatggcgtgaacccgggaggcggaacttgcagtgagccaagatcaagccactgcactccagcctgggcaacagagcgagactccatctcaaaaataataataataataataaggtactaatatgatccagactagaagagaatagcactaaaatgggagatggggtaaacctgtggttttttttaccttaggcttttgacttccaaaattattgtttttgctgggtgcggtgggtcactcctgtaatcccagcactttgggaggccaaggtgggaggattgcttgagcctaggagtttgagaccattctaggcaacaaagcaagaacctgtctctaaaaaaatttaaaaattagccagaaatggtggcacatgtctgtagtcccagctacttgggaggctgaggcaagaggattgcttgagccttttgaagttgaggcttcagtgagccatgatcaccccactgcactccagcttgggcaacagagcaagaccccatctcaaaaaataaaacaaaatagactgggcacgatggctcacgcctgtaatcccaccactttgggaggctgaggtggatggatcatgaggtaaagagatcgagaccatcctggccaacatggtgaaaccccgtttctactaaaaatataaaacttagctgggcgtggtggtgcacacctgtagtctcagctactcgggaggctgaggcaggagaatcgcttgaacccgggaggtggaggttgcagtgagccaagattgtgccactgcactccagcctggcgacagagtgagactctgtctctaaataaataaataaataaaacaaaataagtaaaataaaataaatgtttgtagttccaaaatattttgatgacataatttcttcttgttctaataaaactacatatgcattggtcctatgacctagtaatcacactattaggaatttatcataaatacacacctcaaaaattacaaaaatacatatataccagcttatttattacagcgttatttgtaattgcaaaaacattgtagatagaatggaggtcacataaaacttattcttaagattcagaccgggtgcaatggctcacgcctgtaatctcggcactttgggaagccgaggcaggcagaccacccgaggtcaggagtttgagaccagcctggccagcatggtgaaaccccatctgtaccaaaaatacaaaaattagctggtcgtcgtggcacgcctgtaatcccagctactcgggatgctgaggcgcgagaactgtttgaaccccggaggcagagactgtagtgatctgagatcatgccactacattccagtctgagcaacagagcaagacttcgtctcaaaaaaaaagatcatagatcatcttatcaaatcaaagtatgcaaaatattcaagtaaacttcagataaatatgaaggctaaaccattcagcttcttcaccaaacccttgaatgtcccacctgtctaaatggagatacatgtttgtttgatttattggttaactgtttttattccatttttcctcaaatgatcccataatttgaccttaggaagctgttcaaatagacacattaggttgaatggaaagactactcgatgatatttaggattttaagaggattttatgtattttttccttgtgtgcaataatttaatagcatcttgaataggattttctgatattactaaccctctgggaataatattaggtaattagacagttagctaatattaaaatatgtatcaggtaatatttattgagagtttcctctgtgccaagcaggatcaacttcataggcaggcgacctgtgcggggacacagggcttcatgcttagataggcccccttgctttgaaggcccctaccctttggttagggctctgctgttaccatcttgaaattcttaataatttttattttatttttttgagtcagggtcttgctctgtcgccctggctggagtgcagtggactcactacagtcttgaattcctgggctcaagcaatcctcccacttcagccttctgagtagttaggacgacaaacacacgccaccatgctcagataagttttttgtttgtttgtttttttgtttttgtttttgttttttgtagagatgggactgtccctatgttgctcaggctggtctcaaattcctggcctcaagtgatcctcccacctcagcctcccaaagtgctgggactacaggcatgagccactgtgcctggtcaatcatttttattaacaagcccaagccctcttttttttttttttttttttgagacagggtctccctctgttgtccaggctagagtgcagtggtgcgatcttaccttcactgcaacctctgcctcctgggttcaagtgattctcctggctcagcctccctagtagctggaattacaggcacccacccccatgcctggcaatttttttgtatttttagtagagatggggtttcaccatgttggcaaggctggtctcaaactcctgacctcaagtgatccacccaactcggcctcccaaagtgctgggattacaggtatgatccactgcgcccggcctccaagccccctatttttattttgcactgaccctacaagttacgtagctaggcttagttatgtttttagcaaggaaagtgtataatctcatgtaccttttgaaagattactcaggtctctgcatgtgaaatggaatttagggaatgcaagagagggagtaaaaataacagcgaggaagctatgatagcatttaaggttgctttgactcaggggtagcagtagatagggtaagtaattgatagtttcaaaatatattttgggagtagtaagcattggtatggattagtaatatactggatgtggggatgcagaaaaaaatattaaaaattacttctgaaattctggctggaatagaagtgccacttaccaggtaaggaaggttggagacataacatatttgagggtgtggtcaaaagatgagtttgacattatgctatgtcatataaaagacatataaaagactacctattttataattcctttttaataaaatattcagaaaaagcaaaactgtggttgcctgaggctgaagctaggaagattgactacagacaagcatgagggaaattttgggggtgatgagagttttctaaaactggattgtggggttggttgcattactgtataaatttattaaaaatccctgcatcgtataggggcactatattgtatgtagaaagctgtgaaaagattttaaaaatgattgacatgtctgtggttatatcaatgagtactattattattcccattttatacataaagaaaataaaagagaagttaaaaataaaagtttcatggttacatagctactaggtgtaatatccagtattggaatttgaatctttttgacactaagaccttactctcgatcatataatacattcactttctattttaaagttatattatagccgggcacagtggctcacacctgtaatcccagcactttgggaagccgaggcaggcagatcacgaggttgggagatcgagaccatcctggctaacacggtgaaaccccgtctccactaaaaatagaaaaaattagccaggcgtggtggcacgcacctgtatcccagctactagggaggctgaggcaggagaatcgcttgaacccagaaggcagagcttgcagtgagacgagatcgtgccactgcactccagcctgggtgacagagtgagacaccatctcaagaaaaaaaaaattatattataaatgctgcatctcattggtcagaagctctcttgaaattataaaacaaagaagaaaaaagataaagactgggaaattgtgttgaatcagtatataaatcctgtatactggtccttccatttcccctagaaataagtgatacaggccaggcgctgtggctcacacctgtaatcccagcactttgggaggcggaggctggcagatcacctgaggttgggagttcaagatcagcctgaccaacatggagaaacccccgtctctactaaaaatagaaaattagctgggcatggtggcacatgcctgtattcccagctactcgggaggctgaggcaggagaattgcttgaacccaagaggaggaggttgtggtgagccaagattatgccattgcactccagcctggggaacaagagtgaaactcaaaaaaaaaaaaaaaaagaaagaaaaagaaaaagaaagaaggaaggaaggaaggaaagaaagaaagaagtgatacaacaagttacagcatctttgtttattatccactgtgagttgtattaccacactttacttggctctttggcaaactatattatctcttcagatcactagggctaggaaggcccactggtaacttgaaggagtaaatgtatcttctaaaaaatgcttacttccagggagattggatccacacaagtgaatacatatatagtccttagtgtatgctatgattattttactatgtcagtagcataaagattgctatattaataagcattaagtgcctgctgtgctagacagtgaggatgcaagtggccaccaaaatagcatggtccctgccctcctggagcttctttttttcttcttcagtgggggaagcagatactttgcttatgcaaaaataattataaaatttaaagttgtgccaagttcaatggaaaaaatataaggtgttctgagagagcataacaaaggatcctggttttaactggggcctaatggaagacctctattaggaaataacatttaaactaagaccagacagacctgtagaaattagcaaagcaaagggagggaggaaaaagcagctttcctggcaaaggaacaatttgtgtgaaggccctgagacagggaagggctggggttctgaccaccctccaagtggtgcaatggaatatagtgagagagggagaagacatgagaacttggatactatgcaaaggatttggtattttaattcaagagcagtatgatgctactgaggagcagctggacaattgtgtgatccaattaaaattttaggaagatgaacctcgctattgtggagaatgcatacacaagggttctgttggttcatgaagaggtcttaagaaaactatgagctgggtgcagtagctcaggcctgtagtcccatctacttagaagtctgaggcgggaggatcccttgagcccaaggagctggaagttacagtgagctatgattattccactgtactccagcctggatgacagagcgagatcctgcctcagaaacaaaaaccaaaaaacaaacaacaacaaaaacaacaacaacgaaaatctcagaaaactacaggccttattatcaagaaaatgacaggccttattattgagaaaactacttacatttttaaaagctgattttcaaaaaccagattgtgaattaagtgatgctgaataggggaaaaaaagactgataaaccagtgtatctctgaataacccactagatcagtgcttgtcaaactttaatgtgttttcaaatcaccctgatgttttgttaaaatgtaagtcatgtctcagtaggtctagaggagggcatttctgcatttctaacaagctccccggtgatgcctagaccattggtcctcacactttgagtagcaagtgattgggctatactctttattctaaattctaaatgtattctatcttctaatgcctatcagccctcttgctggtctggctaattatcaaacttgagcatttaaaactgggggttttcagagattaattgaagtgttaaagacatggaaatataggtcacatatggcttttcatctcttccggaaatatcctatatatccttacttcttttctacctacctaacctatgtgcctaccccttcacttatgttcaaggttctattatacttcaaaaggactctatgcaatcaaagtgatgtccaagacaaatatacagaaatagtatgaggctctaacactttacatctaatggagtggtttgcatcattaattgaggcttactctgtgccaggcactttacctgccttcttcatttaataggataggagcaggaactcttagaggttcatttcttgttcaaggatatacatctcatctctggcttatatcacagtggactcttttattcactatcctaatcattataattttgtttggtgacaacaattctaaatgcagaaaagttaaggctctttattctgtgactaaaggctttgtattttctaaagatttgtggagctttgctgccattatttcaataattttataaagatcctaggtggtaaataggcctggctttttttctttttgaaatcttctccgtcttcttcttcattagcagtgcaacttcttgtggcatatggtacccaagatcttgggaaaaggattgatcaagtaaagggaaacgatagagagagtgtgctctacaactgagatcatgctccttgtgaaagacagggtagggaaatttcttattgctccctggttcttaagaaatgagagctaacaatgacatccagttttaaaagaaataaaatctgaattgtacttttaaattttataagccagagttaaaccaatagattgtaactcctgctaatttgatagtagctccagataatgaggaagtgacagggaatgctaatttcatttggtaagagataaaactgaaattattaatgtctccacggaaatgctaaatgcctccttacaagtagggtccggctaattgtctgtcttccaacaagccagatttgttggtgtttttccagacaatgttgtgtagttttcggtttggttcgatcccctttcttgtgatcaaagaaagtgattcaaatgtttaatgagtcttgatttggattggagacttgcagaacggctagcctcacagccccaaggctggctttccctaaggtaggtttcctatgcaccgatactggcaaggcgctttggctggaaactctggaaggaagccaaaggaaagtgaagttcctggcgctagcgcgtgtcctgctcagagagcccggcgctagctcattcttcgtgcagttattggctgggactctgtgtgccgctgtcggccaatgaagacgctggagatcgggcccctgcccgtcccctttctgcgccccgggatgaggcagagactgaacagccggcgagcaaatcaacggcatccagaaagccatgtcggactcggcgcccagcgcccaagcgctaacccgctgaaagtttctcagcgaaatctcagggacgatctggaccccgctgagaggaactgcttttgagtgagatggtcccagaggcctggaggagcggactggtaagcaccgggagggtagtgggagttttgcttctgcttggtgccttgaacaaggcttccacggtcattcactatgagatcccggaggaaagagagaagggtttcgctgtgggcaacgtggtcgcgaaccttggtttggatctcggtagcctctcagcccgcaggttccgggtggtgtctggagctagccgaagattctttgaggtgaaccgggagaccggagagatgtttgtgaacgaccgtctggatcgagaggagctgtgtgggacactgccctcttgcactgtaactctggagttggtagtggagaacccgctggagctgttcagcgtggaagtggtgatccaggacatcaacgacaacaatcctgctttccctacccaggaaatgaaattggagattagcgaggccgtggctccggggacgcgctttccgctcgagagcgcgcacgatcccgatgtgggaagcaactctttacaaacctatgagctgagccgaaatgaatactttgcgcttcgcgtgcagacgcgggaggacagcaccaagtacgcggagctggtgttggagcgcgccctggaccgagaacgggagcctagtctccagttagtgctgacggcgttggacggagggaccccagctctctccgccagcctgcctattcacatcaaggtgctggacgcgaatgacaatgcgcctgtcttcaaccagtccttgtaccgggcgcgcgtcctggaggatgcaccctccggcacgcgcgtggtacaagtccttgcaacggatctggatgaaggccccaacggtgaaattatttactccttcggcagccacaaccgcgccggcgtgcggcaactattcgccttagaccttgtaaccgggatgctgacaatcaagggtcggctggacttcgaggacaccaaactccatgagatttacatccaggccaaagacaagggcgccaatcccgaaggagcacattgcaaagtgttggtggaggttgtggatgtgaatgacaacgccccggagatcacagtcacctccgtgtacagcccagtacccgaggatgcccctctggggactgtcatcgctttgctcagtgtgactgacctggatgctggcgagaacgggctggtgacctgcgaagttccaccgggtctccctttcagccttacttcttccctcaagaattacttcactttgaaaaccagtgcagacctggatcgggagactgtgccagaatacaacctcagcatcaccgcccgagacgccggaaccccttccctctcagcccttacaatagtgcgtgttcaagtgtccgacatcaatgacaaccctccacaatcttctcaatcttcctacgacgtttacattgaagaaaacaacctccccggggctccaatactaaacctaagtgtctgggaccccgacgccccgcagaatgctcggctttctttctttctcttggagcaaggagctgaaaccgggctagtgggtcgctatttcacaataaatcgtgacaatggcatagtgtcatccttagtgcccctagactatgaggatcggcgggaatttgaattaacagctcatatcagcgatgggggcaccccggtcctagccaccaacatcagcgtgaacatatttgtcactgatcgcaatgacaatgccccccaggtcctatatcctcggccaggtgggagctcggtggagatgctgcctcgaggtacctcagctggccacctagtgtcacgggtggtaggctgggacgcggatgcagggcacaatgcctggctctcctacagtctcttgggatcccctaaccagagcctttttgccatagggctgcacactggtcaaatcagtactgcccgtccagtccaagacacagattcacccaggcagactctcacggtcttgatcaaagacaatggggagccttcgctctccaccactgctaccctcactgtgtcagtaaccgaggactctcctgaagcccgagccgagttcccctctggctctgccccccgggagcagaaaaaaaatctcaccttttatctacttctttctctaatcctggtttctgtggggtttgtggtcacagtgttcggagtaatcatattcaaagtttacaagtggaagcagtctagagacctataccgagccccggtgagctcactgtaccgaacaccagggccctccttgcacgcggacgccgtgcggggaggcctgatgtcgccgcacctttaccatcaggtgtatctcaccacggactcccgccgcagcgacccgctgctgaagaaacctggtgcagccagtccactggccagccgccagaacacgctgcggagctgtgatccggtgttctataggcaggtgttgggtgcagagagcgcccctcccggacaggtaaggtttagcaagtcatgcttgaccctgttagtgcttttttattcctacatcatattgaggaaggaatggagctgtttttttagtgatgaagatgttttcctggtgatgcattcacactttcaactggcccttcctagatcaaagttagtgcctttgtgagatggtggcctgccagagtgtggtttgtggtcccatttcagggggaagatacttgactcatctgtggacctaattcacatcctcagcactcttttgctatcacaactaaccaatcttgctaagggatggttaagctaaaacacaagatctcagcgatcagagtttagcttggtatcatttacattaggaataagctgctggatacctctaaccagtggcagcttctaggaatacaaaaactacctcattcctccacctttcaagtgattgtgacatttgtattaaaactaatagctttttgataattttcctttgtttatacagatcgtgtacctcattctcagataattttttatgaatgaaatgaaattccaggcatcctttaaattttatttcaagcattctactggaaatgatgtgcaccctgcttacaaaatatttttaccttataacagtaatgcatgtttgctagaaaattcagaaaatacagaaaagtatttaaaaaattaaaactataatctccaaacccaaagataaccatttttaattataaaagtaataatttatttcaaaaataaatctaggcaacccaagaaaacataaagtagccagactcagtggtgtgcacctgtagttcttgctgctcagtgcctgaggtgggaggattgcttgagcccaggagttctgggctgtggtgcactatgctgatcaattgatcaatccactgtctgcactaagttcagcatgaatacagtgacctcttgggagggcaggaccatcaggttgcctaaagaggggtgaactggcccaggttggaagtggagaaggtcaaaactgctgtgctatccagtagtgggatgacatctgtgaatagccactgcactccagcctaggcaatatagggaaaccatgtctctttaacaataacaacaacaacaacaacaatcccagaaactacaaaaggagagtctttttggtgcctccagtgttagtccctgtccttccagccttatttttcttaagtatatgcacaatgtgaaaggtagataaattcatatccttagacaggtaaagcattcattaattcagggtggtatgcaaggatactatccaaggcatggtatccatgcaaggtgactgcaaggcctttgccctggagagaaccctatacatactctcaactgtaggagaaacactgttattttgttactcagtgcatcattgctatcaactcttggatttggcagttagtcaaatgaggttctaccatttaccaactaggagtctgtggccaagttactcaatctcctttctaagcctcttcctcatatgcaaaaagggaataataagtgttttataagattcatgcatgatataatgtatgcaaagtgtttagcatggtgcctggcatatcataactgttaaacaattattagccagctcctagcattttgggaggctgaggcaggcggattgcttgaggccagcagttcaagaccagcctgagcgacatagtgagatcctgtctctacaaaaaaaaaaaaaaatgtgttttcattagctgggtgtgttggcatgcacctgtggtaccagctacttgggaggctgaagtgggagaattgcttgagcctgggaggttgaagctacagtcagctgtgattgcaccactacacttcaaccatggcaatagagtgagaccctgtctcaaaaaaaaaaattatcagctattactataattatttttattagttcctcactcacctaaaatctcaaacacaccttagaaatacacatatgagaacaaccaaaaatgacaaagtagaagcacatatgaaaaggctaagaaagcatgaaagccagcaagaaataactgccgctcttctggtcagcctggaaagcaactggcattttccctagaacaatgttttcaaacttggttgcacattaaaatcacctagagaccttttaaaaattctgaaacccaggccacaccccgacaaatgaaagcacagtctctgggggtgggacataggcatcattttttgaaggtccccacttgatcctaatgtgcagacaaatttgaaaaccacagctttgggaggctgaggtgggtggatcataagatcaggagtttgagaccagcctggccaatatggtgaaaccccgtctctactaaaaatgcaaacattagctgggcatggtggcgcatacctgtagtcccagctactctagaggctgaggcggaagcatcagtgagggagaatcagtgaacccaggatgtggaagtttcagtgagcccagatcacaccactgcactccagcctgggcgacagagcgagactccacctcaaaaacaaaaagaaagaaagaaaaaagaaaagcagtactctggaacctaccaatccatcatttagcatatttgtgaagtaaagtgttattctggtatttgcagaaccagaatccagctttattgggccaggcccaatttttttaaaaaacatggtaaggtctcccagccttaaagtattacatagcatagctctaaaagatcactgtaggaagacataaaatggtatttcagtcatctaagggaaaaaccttcctaaagcactagcccctggacaactattatttaaacatctacagctgttcaatagatattgggttctttttggagggatgtgacaaaattcttgtataattagattgtgatgatgattgtatcagtttagtacatgtaaatacactgaaaaccattggattatacactttaaatatgtgatttgcatggtatgtgaattatgtctcagtaaaaatctagagatggggctgggctcagtggctcacgcctgtaatcccagtacttagggaggctgaggccagcggatcacctgaggccaggagttcaagaccggcctggccaacatggtgaaacttcatctctactaataatacaaaaatcaggccgggcctggtggctcacgcctgtaatcccagcactttgggaggcggaggcgggcggatcacgaggtcaggagtccaagaccagcctggccaacatggtgaaaccccgtctctactaaaaatacaaaaattcaccaggcgtggtggctgaggcaggagaatcgcttgatggtggaggttgcagtgagccgagatcgcgccactgcactccagcctgggtgaaagagcgaaactccatctcaaaaaaaaaaaaaaaaaaaaaatcagccagatgtggtggcaggtgcctgtagtcacagctacttgggaggttgaagcaggagaatcgctttatctcaggaagcagaggttgcagtgagccaagatcatgctgttgcattccagcctgggcaacaagaacaaaactcactccatctcaaaaaaaaaaaaaaaatatctagagatgggagaatcatatggctggcataaaaaggtcaagtcaaagatatgtaagattaaggctttacgatgctccagttctagtaaaacagaccaggtacttgttttggtgtgaaattgccaatataagtatagtactgtacatattagttgtttagcttaggtaagtcttttaatctctttaaactccagtttcctcatctataaaataaagagaatatctactttgcaaacttgttgtgagagtgaaaagtaatgcatataaagtccctgtatggagcaagtactcaataactatttgttgaactaaaaatgataatactgatattcaccatttattagcatccctatgtgccagacactgtaaacaattaaaagttatcattctggtacccagagtacagtatgagacagacatgcaaaaaaaaaaaaaaaaaaagataatggagatctgcatagcataagatgcagtgggaccaaacgggaaaaaacacctaaatgagcctggagaaaggaagaaatgatagaggtggtgatgcttgagctatgatctaaaggttgagtagtagcttgtcagacagtaaaggggaaaggacagggcagggaggggccattgcaagaaattccatgcagagggattatggtatttcattatcactgaaccttaaactgtgtgtgtggccgggtacggtggctcatgcctgtaatcctagcactttgggaggccaaggtgggcagatcacttgaggtcaggagtttgaaaccagcctggccaacatggtgaaacctcatctctattaaaaatacaaaaaattagccaggtgtggttgtgggtgcctgtaattccagctacttgagcagctacttgagaggtcgaggcaggagaattgcttgaacccgggaggcagaggttgcaatgagctggtgtcaggccactgcactccagcatgggcaacagagagagactccatctcaaaaaaaaagtgtgcgtgtaaaacagacagtctttgtaggagatgaggtgaagcaagtaggcaggagttagatcctgagttacctttgggccaagccaaggagtttttattttattccatatagatgacagtcactgcagaaatttgaactgatatgcatatatcatgaggtttttttgttttagaaatattattctgtcagtcataagtgaagggactggggacattgggactggaggcaaagagatcttatctctttgcaatagtttgaaagctattgcaatatttgaagagaagattgataaatgcttgaaccagcacagtggcagtacagatggagggagctgactacaataaaatcatcaggacttgttgattgacatgatataggaagtgagggacagggatgagtcaaggctgatccccctagatcctgactaaggaagctgggtggttgacagtgccattcacagagacagtgaattctggcataaacacctaataggtcaggctggtttacacctccatcattcccatgggagaaggtatagaggggtgtgtgtttgtgtgtgtgtgtgtgtgtgtaaaagaacacagaaagccagattcctctttttgacaccagaatattggttcccaccatagtcaaaaggatattcctgaggatcgaggcttggaaaaatattggggaaggataagaactccagttgttgctgctttttttggcagccagtgtaacctaggtaaggacttggttgaattaagaaatttcatgtccagatcaggatggatttttctatttctctgagctctggtgtgtttcccactcagattgcaggtcgtaggtacctacggtgtgaattgtgttgtgtttctgtgcttgtgcaagggagtagctaggttgctgggaggtctggatgagggtgggggtggggtgagatcaagtctccagctccaagaggtcccctggggctaagtgaaaagcttgctcttttgaaatggtcttcgttggtaattaacaaaagatcaagaataccttggtgtcagataaagggaatttgtaggcacaatgctgttggtagctgatctcaatcattcaaggaagctattaaatctatgaacattagcattctgccaggtaaagagatctggtccttagcacctcccagacacactgattctttactgttttgaaacatctccctctcctggcttcctccaccccgcttccatactgtccttgaaatcaatgaatggtaatttagtgtatctagtgtatcactagcaaatgtctgaataagaaaggtttggtttccgctgtgtctcctgttacaatgagaacatgtactgcataaatttaattggctacgttaatgtgtaagccttttctgcaaagagatggatccgtttctgaatattctgcagaagggcagagttttgagtatatggcagtggttctaattagcagttgctccaatacaatcagactgagacggaagctactcatttagaatactggttgatgacaacactggcttgaacaaagtgaccactctccaatggctactctccctctcagtgggccgcaggttgctagggctcaggctgtggctgttttccccgccgaaaaggggcggggtcagtcggtgtgttaggaaaaaaaatgtatatatatatatatgttgtctgcctccccacagagataacaacccgtggaaaaacatgccgttgagcgggaggaaggcgaaaagataggctgggttttttggggggtgggggagcgtggaggatagggtgggctttttcccctccaatgctgcgacgcattaaccctgctgctgttgggacgttctctgctcagcctattggctgagcccgggagccgctgtctgccaatcgggtggtgaaaggcagacaaatctaccccgccaccagcaaaaacggcgcgtaacccttgcggcgccggccgaaccgcgccagagctggcgcggggaaagggagataggtgtctccagctgctgtggctgtttggggcgggtcggcttcatccgcgtctcaggagcaagtagagaattagcgggcggcagcaatgctccgcaaggtgagaagctggacagaaatctggcggtgggctacccttttgttcctcttttaccacctgggttacgtttgtgggcagatccgctacccggtcccagaggagtcacaggaagggacttttgtagggaatgtcgctcaagatttcctgctggatacggacagtctgtcagctcgcaggctgcaggtcgctggagaggtgaaccaaagacacttccgtgtggatttggacagcggagccctgctcatcaagaacccaatcgaccgagaggcactgtgtgggctcagtgccagctgcatcgtgcccctggagtttgtcaccgaaggtcctttggaaatgtaccgagcagaggtagagatcgtagatgtgaatgatcacgccccccgttttccgcggcagcagctggacttggaaattggggaggcagctcctccaggacagcgtttcccgttggaaaaggctcaggatgcagatgtggggagcaattcgattagcagctataggctgagctccaatgaacactttgcactggatgtgaagaagcgcagcgacggcagcctggtcccagagctgctcctggagaagcctttggatcgagagaagcaatcggactaccgcctggtgctgactgctgtcgatggagggaacccgccgagatctggcaccgcagagctccgggtatccgtgctggacgtaaacgacaacgccccagccttccagcaatccagctacaggattagtgtgttggagagcgcaccagcgggcatggtgctcatccagctcaatgcctcagacccggacctgggtcccagtggtaacgtcaccttttatttcagtggtcatacccctgatcgtgtaagaaacctctttagcctgcaccccactactggaaagcttactcttttggggcccctagactttgagagtgagaattactatgaatttgatgtgcgggctcgcgatgggggttctccagccatggagcaacattgcagccttcgagtggatctgctggacgtaaatgacaatgccccttacatcacagtgacctcagagcttggaaccctccccgagagtgcagaacctggcactgtggtggcacttatcagtgtgcaggatccagactcagggtcaaacggagatgtgagcctccgcattcctgaccacttgccatttgccctcaagtctgccttcaggaaccagttctccctggtgactgctggacccttggatcgagaggccaaatctagctatgacatcatggtcactgcttctgatgctgggaaccctcctctcagtacccacagaactattttcctcaatatttcagatgtgaatgataatccaccctctttctttcagaggtcacatgaggtgtttgttcctgagaacaatcgcccaggggacctgctttgctcccttgcagcctctgacccagactctggcttgaatgcgcttatctcctactcactcctggagcccaggaatcgagatgtatcagcttcctctttcatctctctgaacccccagacaggagctgttcatgctactcgatcctttgactatgagcaaacccagacactgcagtttgaggtgcaggcccgggatcggggcaacccaccccttagcagcactgtaacagttcgtctatttgtgctggacctcaatgacaatgctccagctgtgctccgtcctcgggcccggcctggttccttatgtccccaagcactgcctccatcagttggtgctggccacctaatcacaaaggtgactgctgtggacttggattcaggttacaatgcttgggtttcctatcagctcctggaggccccagatcccagcctgtttgcagtctctcgatatgctggggaggtgcggacggctgttcctatcccagctgacctcccaccacagaagctggtcattgtggtaaaggatagtggtagtccaccactctctacctctgttactctcttagtgtccttagaggaagacactcatccagttgtcccagatcttcgagaatcttcagctccaagggaaggagaatctcgtctaaccctctacttggctgtgtccctagtggcaatttgctttgtctcctttggctcattcgtggcactactctctaagtgtcttcgtggggcagcctgtggagtcacatgctttcctgctggcacctgtgcctgtctcaccagatctcgaaggagggaggggcttcccccttccaatgggatcctccgaatccagctagggtcagatgaccctatcaagtttgttgatgtgggaggccactctcatggctgtacacccttggcttctgcacccactcggagtgatagcttcatgatggtgaagtcacccagtgcacctatggcaggggagcctgttcgcccaagctgcccaccctctgatcttctctatgggctagaggtgagacctttgcaggctcaacaaatgcttgagggttattctgatccaggcatatggctaggccatgtcctagagagtactggcctctcagtaagtgcccatagtgatgtcaccatttttgtaagaggtaactatgtggtagacgctgtgctttgtaactgtttcgtgaattaaccagagttgtcacagtttagcattgggggcgggtcatgcctatatctgagtaagaaatgaaagtaattggtgatcaagagccaggctgttgtggaagcatgatgatggaatgtgggagcacaggaggctacagtgcacagggtacagtgcaccaggcagtcacttggacaaaggtggctgttttctctactcttcctgaaagaggggatcagattctgaagtaccttaactctaggttaccatttcccaagggattgaggggaaataaaatctttgtctcccagtatctagtacactgtgaagggacctctctatttgaaacatagagacagcagaaagaggagagaactaaaggaatagagaggcacgcatcagagtggtggcatagatcttttggtctgggtcttaggactcatatcaagtccctactggggatttgaactagatgcggtaaattggaaggttggggcgggttggtcatcacctttggaaaaaacagtaagtgaaatcacttatgtcagaaaactggtttacagttggctgattcatagaaacagccaccctgtgcatctttaagttgagttctcctgaatttggtgaaaccatgaaacctagaagccaagccatccatgcttggcctctgaccaccctcctgggtgacctgattcagccccagaaatgttcccctacccaaaaactgtaacactcattccacatttggggtctggggtgtcagaaaagctaagtcccatgtcagctgacattgagatttccgcaaagcattgctggagagtcagggcaagactttacaaggttcttactaatcttttctctcaccttagcagcattcagcaggatgggggagggtgggggaatacatgggctttgcctctcccagaaggacaagattttgctggttcaagcaaagtggtggaagcttctgaagtcatgcaggaagttgctgggacagaacgctgaggagttttgtatcactttgtcttccctgttgagtaccatctgagctgtcaaactttgctgccaagggggctgaatcaacctgcagcacgaagtgagtggggaggtaggaagcttctgtgacacagatttgcagcctgtgttcccaaggtttccaggattgaggaaactccataattggttgagagcacacagactttttggccaatcagactcagagctgaggtgggagatctgctcttccagcccgcctctcctcctccagctccccagctccactcaaattcagctcccctcccccctgcccacccccgccactcggtgactaagaactgctgcaagcaggcaaacctccgagcagtttttaagaggctggaaggagacataagagacttcagctgctgcattccaagccctgggtctaccttggagacaggacagcacagacttactctccacaaagggacttctgggtcatggggcccaagacactcccacagctcgctgggaaatggcaagtgctgtgcatgttgtccttgtgctgctggggctgggtgtctgggcagcttcgttactcagtggtggaggagtctgagccggggacgctggtggggaatgttgctcaggatctgggcttaaagatgacagatctgttgagccggcggctgcaattgggctctgaggagaatgggcgctatttttccctgagcttgatgagtggtgccctggcagtgaatcaaaagattgaccgagaaagcctatgtggagccagcaccagctgcctgctgccagtgcaggtggtgactgaacaccccctggagctaatccgtgtagaggtagagatcctggatctcaatgacaactctcctagctttgccacccctgagcgagagatgcgcatctcagaatcagcagcatctggggcacgattcccactggacagtgcccaggatccggatgtgggcaccaatactgtgagcttttacactctaagccccaacagccacttctctctgaatgtgaagaccctaaaagatgggaagccattcccagagctggtgctagagcagcagctggatcgtgaagcccaggcaagacatcagctggtgcttactgctgtggatggggggaccccagcccgctcagggaccacccttatctctgtcatcgtgctggacatcaatgataatgctccaaccttccaatcctcagttctacgtgtgggaatcccagagaatgcacccattggtactctgctgctccgcctcaatgccactgatccagacgagggcaccaacggccaactagactattcttttggagaccacacatctgaggcagtgcggaacctctttggcctagaccctagcagtggggcaatccatgtgttgggtcccatagactttgaggagtcacgtttctatgaaattcatgcaagagcccgtgaccagggacagcctgccatggagggccactgtgtgattcaagtggatgtgggggatgtcaatgacaatgccccagaggtgctattggcctctttggccaaccctgtcctagagagcacaccagtgggcacagtagtggggttgtttaatgtgcgagaccgggactcaggtagaaatggtgaagtgagccttgatatctctccggacctgccatttcagattaagccttctgagaaccactactcgctgctaaccagccagcctttggaccgggaggccacatcccactatatcatcgagctgctggccagcgatgctggttcaccttccctacacaaacatctcaccatcaggctcaacatttcagatgtcaatgacaatgcaccccgcttcaaccagcagctttacactgcttacatcctagaaaaccggcctccgggctcccttctttgcactgtggctgcctcagatccagacactggggataatgcccgcctcacctactccattgtaggaaatcaggttcagggagccccagcctcctcctttgtgtatgtcaacccagaggatggacggatctttgcccagcgtacctttgactatgaattgctgcagatgctgcagattgtggtgggggttcgagactccggctctcccccattgcatgccaacacatctctgcatgtgtttgtcctagacgagaatgataatgccccagctgtgctgcacccacggccagactgggaacactcagccccccagcgtctccctcgctctgctcctcctggctccttggtcaccaaggtgacagccgtggatgctgatgcaggccacaatgcgtggctctcctactcactgttgccacagtccacagccccaggactgttcctcgtgtctacacacactggtgaggtgcgcacagcccgggccttactggaggatgactctgacacccagcaggtggtggtcctggtgagggacaatggtgacccttcactctcctccacagccacagtgctgctggttctggaggatgaggaccctgaggaaatgcccaaatccagtgacttcctcatacaccctcctgagcgttcagaccttaccctttacctcattgtggctctagcgaccgtcagtctcttatccctagtcaccttcacctttctgtcagcgaagtgccttcagggaaacgcagacggggacgggggtggagggcagtgctgcaggcgccaggactcaccctccccggacttctataagcagtccagccccaacctgcaggtgagctcggacggcacgctcaagtacatggaggtgacgctgcggcccacagactcgcagagccactgctacaggacgtgcttttcaccggcctcggacggcagtgacttcacttttctaagacccctcagcgttcagcagcccacagctctggcgctggagcctgacgccatccggtcccgctctaatacgctgcgggagcggagccaggtgaggggctcggcgccgccccgggcgacccctgggggcggcactggagaagccgcccgtcctcataagggattgaacttgcatccactcctctccggccggcttggtcgctggctgcgctccacccgattctcgggatcattggaccgtttgcgcgaaaccagagtggccgattaagggatggggctccgagcaccgggggtggtggcgactgtgggcgaggggaggtgggaccgacccccacccctacactcaaaaaaggccggggcctccttcgagcttccggtgaatttcgggcgatttccgcgggtgtcgggggtcccgggaggaggcagtcacagatccacccctgcagccagcctcctaggcgccggctccggcacgcttcgccggtctgtagatttcctcttcgatttctccccagctcccagcatctgtgacttcactgttaccctccctatccccgcatcacccaaccgcacctgtctgcgggacttaggtgtgcgcgcggggctcatgcgtgtcctccctgctggccacccccacggcccacacaagttgcacgggctcgccacgccccgccaacacgtgcgcggacgcacgcacgcactcctcgcacgtgggcttacgcgaataccagctttcactgccactcgctcgcggccagattcacaggcctgttccggtccactcgcagctcccctctgccgctccctccgccgggctcaggagtactcgtagctgattgtgcgcgcctgagggtcccagatcgcggccgcccaggaccaggcgaggactccggagcctcctctcacctctcccacctgcgccccgggctgggccgggtcgcctggggggcggcctgagcgaggcgcggggccaggagcgctggagcgactgccgctctaagtgccgggcgggcaggactctacgatccttgggccagaggtccggatggtcccgggactccgtctcaagggtcggcgacccctcaacccagaagcctcgagcaggcggacaggcagagctgcccagtggccgaggcgcggcagggctccgcgttgggcgagtgagtgagcctctataggacagcaggactgggactccagtggcaccagcggccccttcctcccgcaggaagtgaaagcctcgagcgccctggctctcaacccccagagatacaggcttttggcgccgtcgtgatcacaatgtgcccagcgatctagggtcagagatttggaggtgaccaaactatctgacactctaacaagtcctgtctcctctggcagatggaaagctataggctctgccagatgccagggtgcccttatgtgtgaggaaactacaatagtaaaaaacacaagtttctccaactccaggagcttttattcaaaatatatcaatgcctaactctgctcctaggactgtattttgaaacacccccaggtgattttgatagctgattgagagaaacttactatataactcctttgagaacctcatctcatttgctcttcccaccattgctgttggctaggtactaacatgcctctcttataacagcttcacagaggtcaagtgacttgctcaagttcacagagcaagtaagagagattctaacccctgtctaactccagaatgtgtgcttttaatttcttggcacttggaactttaaaagcttgaggacaggagaggggagttgcctctgctgggattttgcttctgctgggatggggcaagggtggggttccttcccttttaggaccttacatgtggggaaagtcttctgtggctcctcatttctgagcagtccccgcagcgcaaacttggccagttatccttttggagattgagttcccccagctccgtttcctcctatcacaatcactgcatttccatgtagattctgctgtgtctaagaatacagtggctgagggctggccatccctgtgcccttctccatggcagccccagaatggtgctggtgactcccgatacacctggaatgctaggtttctgggttctgctcatatcactgccacctgtgagccttgagtgagccactggcagttccggagcttccttctccctggagtaatctgagatactcacactctctgcttctgggagcaagtatgagtattaattaccagcccaccccagaaccagtgaggaggtggctctaggagtgctccatgagagtgtgtgatgggataacacaccccctggaaagaccagaagggactcaggaatgaagtggctggccagagccccacaccttcagctaggtgggagatggctacacatcagccccttgggagccctggagacttagttggccctgcttggaggctgtgggagctggatccctccccgctgcatcccttccatttttctccgtctcagacagagcagccttgttctcttctccttagtcacagaccattgtctggcacggagttctaggggtgagaagtgtcccgggacttggatgccccgcaaaggcccaatctggcatgactcctaaattaataatgtatttagctgtgggaagagattcttgcaagccaagggcccagagaagatgtccctgtgaatgtgtcactgcacaacctggcaccaaaagggttaccaagaacagcagccatcttgctgcagaggatgctttgttcccagctgaggagttgaataaattcattctagggctggtagaattctcattgaaaagcctcctttgccactttagggggctttgtctgcacctcttcccccagttccacagaagatgccttcagtccttgaattttggctcaggagttctgactctgggggcagggaggaaggggccatttctttaggaaaggagtctcagcttgctcactgtggtcagatgaaatgtgatttatctcttggtttctggtacctcagacctctgagacctgaggtgtattttgtctttggagatgagtccacccctgccccctcttagtccgttttcttctctgtgcccactcccctccttctctcccggcccatccctaggggctcgggtgacattctaacttctcacgggtactcagcccctttccctctgttttctccacagcaagccccgcccaacacggactggcgtttctctcaggcccagagacccggcaccagcgggtaggtgactgattctccagcccaccctcttctctgcggcattttctcagggatgacgtgggaggagatgggggagggcccagcatttgctacagatggcttctccctcagtttgagatcccagggaggtcttggtgtgcggggggctggcacacagaccccggaaggaagaggcgactgccctgactgttcaggaagctcaattcacatgcttgccccttccctcctcgccacgaccggcaccttttcctatcccctgagggcactgtggaaccaaaggatggtcttaagctggtctctgggtgaaagcgaggctttctatgcccatgtactgcctaaccccctcccctgagttgagctgggctccattatgacctggggctcaggcagaaaagcatttgaccggaggaggcggtccgcactcagcgcctcctccagagcctccagagccgaggctgactgcagcctggggagagtggaggcagcacagctggaggtggaactgaggaaggactgggcggggcatggagcaggcccccttctccggcccctcctcccactgtcctctgcccctacttgtcctgctctctgtctgtggggtctccgtgtctctgcccctttttcttgagtttccgtctttgccactttctcttacctctcagtccttccctcagtctctatctcgctttgcaatctctgcctctccctctcttctccatctctgtcttagcttccgtcttgattgctgcacctcagcctcagtccctttcatttgtctacttgcattgatctgtgccgcccactgtgcctgccatggcataagtgctcaataaatgtggagtgagtaactacacgggacccttagtctctttctccttctctatctctgcctccctgtccttgtcctggacctcttttctgtttctcctttcaccgtttcctagcgccttgtgttcttctatccccagcctctatgtttctctgtctctcactatttctgctttcctctctgttctttgtctctctttgtctctgtctctgtatatctttctttgtctctgtctctggtctctgtgcctgttgtctttttctgcctctttctctgttactctttctttatctctctttttcttttatcttgtcttttttctctgagcctctgtctctgtctctcatttttttgtgcttgtgggcaagccagcacacacaaccccccacccaccacccaccaacaccccgctctcttccttccctgcccctcacacactgagcctttgatcgcagctctccaccagacaccctcccatccaagcagccccagctgctcatttcaatctggtatgaattcctgctgagacaggaaccccctgcgggctgaaggggagggaaacttcagcagaaagaccttcagttggtctgagcagagtgggataggctctgcgccaggcctcccagttagaagtcaggagcctggaggagtctcagagcccagggagagaagcaggagcttgggccaccttaccctacctcctcaatggttgagtacttgctgtccacatttgccaagttgctacagatgctgagcttccaagagttatctttcccccatcctgcaaccaaccaaacccttgttgccacaaggacccaggagcccttggtgtatggcagagattccagcttctgggcatgcacagtcctgtcacccattttaggaacgcaaagcgcttcttagaaggcccctaaaaagcagcagatcaaaaggcttgggctgcccttgcccttcctttgaccccagctgttgtccttctccctgctggccttgccaaccttctcataagttatccattaagtcattaatgtattcattcgttcatttattcaacaaatatttatcgagcatctactatgagcagggccctgtgctaaacattgggctataggagtgaacaagtagatgtgatcccagaactcataggcttccagaccagcagaggagactgaaaatttgcaacaagtaacacttaaaaaaaaaaaaaaaggctgggcactgtggttcacgcctgtaatcccagcactttgggaggccaaggtgggtagatcacttgaggtcaggggtttgagaccagcctggcagccaacatggtgaaaccccatctcgattaaaaatacaaaaattagccaggcgtggtggcaggcacctgtaatcccagcgacttaggaggctgaggcagaactgcttgaacccggaaggcagaggttgcagtgagctgagatcacgaaaaaaaaataatctagccacaaatcacagtaagttctgagaggcagagaacaatgtgagtgtaatgggggggggaagatcagagaaggcttctaggaggaggtgacattgagaagttctaggccatttatgttccctctacctaccaccaccccaggccatacactggctttgaagcagaattcaccattgaacctggaagccccaccaactgcctctcatgtgtcctctggggtgagcaccttacccctgcctcaactcccattccatcaaatgagaggcttagtggcctggaatacatgtgggagctcttggagatatggaggagaaggtgcggaacctctctctctctcctctctctgcttccttagttaacttgtggaggatgcaacaaaccttttttttttttttttttagacagagtcttgctctgttgcccaagctggagtgcagtggtgcgatcttggctcactgcaacctctgcctgccaggttcaagcgattctcctgcctcagcctcccgagtagctgggacagcaggtgtgcaccaccacacccagctcatttttgtatttttagtagagatgggtttcgccacgttggccaggctggtttcaaactccccgacctcaactgatccacctgcttcagcttcccaaagtgctagaattacaggtgtgatcgcccccggccacaacaaacatttttgattcagcggctccaaagtgaaataagcgttaggatctagtccagtaacttcaacttctctccttcattcattcaacaaatggtcagtgagcactttctgttggccaggcagtgttctcgatgtgggaggcccctgccctcaaggagtttacagtgcactgaaggagacaaatattgaccaaataattacaaaaataaatgtgagactgaaactgtcataagtgctaggtagaattgtatctggtggtgtgggcgtataatagggatttgatttagggagcaggaggacatcctggaaatgaagttgtgctgagatctgaaagacaaatacaaattaaccagctaaagaaaagaaggaagagcattccagatggtcaggcataccagcttcaaagcagggctggtgttgagttcttcagtaaacttggttcaagatcaagccagctctgggtcacactgcctacacagaaggaagagcattccaaatgggaaaagcctatgcaaaagccttgtggtgaggcctcctgggatcaagggaatggcagggagttttctctttgctggcactggagtgaggggatgaagaggagaggttccttttatccagtctaaccctggttccagccttctgttgatgccctgcctcactccctccccaccatcttgcccactgccctccagcctggtctggtcagacacaccagcttcaaagcagggctagtattgagttcttcagtaaacttggttcaagttcaagtcagcactgggtcacactgcctagacagaaggaagaagacctggccaggtgtggtggctcacgcctgtaatcccagcactttgggaggctgaggtgggtggatcacctgaggtcaggagtttgagaccagcctggccaacatgatgaaaccccatctctagtaaaaatacaaaatattagccaggtgtggtggtgcacacctgtagtcccagctactcaggaggctgaggcaggggaatcgcttgaacccaggaggcggaggttgcagtgagctgagatcacaccactgcactccagtctgggtgacagagcgagactccatcaggaaagaaagaaagaaaaagagagagagggagggagggagggaaggaaggaaggaaggaaggaaggaaggaaggaaggaaggaaggaaggaaggaagaaaagaaagaaaaagggagaaaaaatgaagaagacttacattctgaagttcctgcttggcacatgcttctcctccccaccactatcccttctcaggtcatcctttgggtgtctgatcccaatagctgttgtctcaagctctgagcccagcaaaccatttcccccttcttaggctgtaacccaggccctgccctgcagctgtccccagcctctgcacaaagagtctccatttggtccctagactgttctctgatggctccacactaccatccctcctctgagagacagtatccctgctctctctcagtttgggcagtcattcaacaaacaaatagcaacttaatttttttccacttataaaatagtacatgctcattatagaaacatgaaaaatagaaaaaaaattaaaaggaaaaccacccatcattttacaatctagggagaaccaccaccaactacagtttaatatgaaacatttcaaatatgtacaaaagtagagagaatggtgtcatgaacctgtatgataccactatccagcttcaactaatgccttatcttgtttcacctatatccctacccttatcctgtccttggattcttttgaagcaaatctcagacatcatataatttcatcttggtctccaccatctttaacagatgacttttttttttttttttttttttggagacagagtctcactctcttgcccaggctgtggcacaatctcagctcactgcagccttcgcctcccgggttcaagcaattctcatgcttcagcctcctaagtagctaggattacaggtgtgcaccaccacacacagctaatattttgtattttcagtacaaacagggtttcgccatgttggccaggctggtcttgaactcctggcctcaagtgatccaccctcctcggcctcccaaaatgttgggattacaggtgtgagccaccttgcccggccagatgattctttcataaggtccacattttatatttgagtgagtgtctcttaagtatcttaatgctcttttaatgtaaaagacttcccctccatcttccatttttgcaatttatttgttgaatccctgccttttcatatatatctttctaaacttttctttgtgtaatcaaagaacatgcatgagcttcatttttatttttatttatttatttatttatttatttatttatttatttattgatacgtagccttgctctgtcacccaggctggactgcagtggcgcaatctcggctcactgcaagctccgcctcccaggttcacgccatgctcctgcctcagcctccagaatagctgggactacaggcgcccactaccacgcccggctaattattttgtatttttagtagagacggggtttcaccgtgttagccaggatggtctcgatctcctgacctcgtgatccgcccgcctcggcctcccaaagtgctgggattacaggcgtgagccaccgcgcctggccgagcttcattttaaaaaaatctcattcacctaaataagttgttcacaaacttgtcacactttcatgtgacactttattcacatattaagaactgttattcccagtcatacggtacatttcctactagttttttaaaaatagcaactgaggccatactgtccaacagaattatagcttttttcttctttgcagtgtatcatgagaatttccccatgtctttcaaaattcttcccaagtcatttgcagagtaactcctcttatgaatatacatattattttacagaataagtcctcatatgaatatacatattatttttctaatgctaatgggcttttgctacattagaaaacatacacattcatttacaattttttttttttgagacagtctcgctctgtctccaggctggggtgcagtggcgccatctcggctcactgcaagctccacctcctgggttcaagcaattctcctgcctcagcctcctgagtagctgggactacaggcacgcgccaccacgcccagctaatttttgtatttttagtagagacggggtttcaccatgttgaccaggatggtctcaatctcttgacctcgtgatccgcctgcctcagcctccctaagtgctgggattacaggtgggagccaccatccccagcctcatttacattttaacacaattaaattcagggtgttgtcagggtgacttcctagatttctcagttttttgagcatgatgtagggagtattttattatagtccagtctatgggatattcccttatacacacacacacacacacacacacacacacacacacacacacaccccaaactcaatagggcaagaaccatattcatcatctcttaaatcctaggtcctgtcacaggccactgcttggaaaatagttgactaaatgtagtccatttcttccatttttacttttcactattccccaaatcctggaagagtccctcatatctgctgctggggctccaaggcctccaagctgaagcccagtacgttgttgtgcataagatcataggccctggaatcatattaggctggctttcaggttgcaactctaccagttccagctgtgtgactctggtatagtctctcaacctctctgagccctgttttcatctgttggaaaatatagataatcacaacacttatctgcagggtgattccgaggataaaaaagacaaatatattacccagtcagcttagaataggaagctctcagtaaatggttaaaaaagaggtctctctccctctgctcatctcttacccagcttcacataattggcagcccacccacctgtttggccctcaaccttcaaccatttcccaggacgcctccttacactcctgatcatcatggttccaaccccactgttccactcagctttgttccctcaacaccactgctccctgtgacaggtcatcctcctaacctctggcatctggtcccgttgtctccctgacaacccgcatgctctcctccctgcaacccccgccgcttgcctgctctccctactttattcccattagcccccttcacctggggctgagaacacctggccttgaccctgcaccctcagccaggcccacagagctcagtcgggccggaagtaaggaccccagatattcagttgaggaatttaacattaatacaataatatagaatccaccagcagattttcataaatgttctgtgtgttcttttatccttttttttaatccaggattttatcaaggagcatagattgcatttggttgtcacgtctttcctctcctttaatctggagccagctcccagtctttttatttttttaatgacatggatatttttaaagagtccaggccagttgtactttaaaatgtccccgaacctggatttgctggctattctctgatggttagattcagattacacaccttggtaggaatacttcccgcagcatcacactgggactcatctaacgtcggcctgtcccactatcagtgatgccgagtttgttcgtgtggtaaaaacagtgtcccagatctctccattataaaaatatatttttataaagatattttaaaatatttgtgaaaatataagtaatctgtggatgatactttgagataggcagcaacccttcatgcaattttagtattccctgatgatccttgcctgtatctgtttttacatcagtgattacaaagcggtgatgttctgtcattccttctacatgtatttgctggtattcttctgaaaattacctggatgatttcttcagatttaaattcactgtcttttccttggggaagcctggactggctgagctgcctaaccctgactctctgtcttttttttttttttgacagggagtctagctctgttgccaggctggagtgcagtggcaaccttcacctcctgggttcaagcgattctcctgcctcagcctcccaagtagctgggattacaggcgtgtgccaccatgcccggttaattttttttttttaatatctattttagttgagacagggtttcaccatgttggtcagaatggtctcgatctcctgacctcgtggtctgcccgcccctgcctctcttcataccctctggtagcccctgacacagcccatggcaagtatcacaattgcaattactctattgtgtaattatttaaaatcagcctctcagtgcccaccatgagcaccgtaaagatggacagtttctatcatactcacagccacaaccccagcacctggctctgtgtctggtacatagaaattgctcaagaaagaattgttggaggggcgcggtggctcacgcctgtaattccagcactttgggaagcggaggcaggtggatcatgaggtcaggagttcgaaaccaacctggccaatatggtgaaaccccatctctactaaaaatacaaaaattcgctgggcatggtggcatgtgtgcacttgtcgtcccagctgctcaagaggctgaggcaggagaatcacttgaacctgggaggcagaggttgcagtgagccgagatcgcgccactgtactccagcctgggtgacagagcgagactccagctcaaaaaaaaaaaaaaaagaaaaaagaaaagaaataattattgaatcaatggaaacagaattacaactcttcccacttttgggaaggagaattgagattcctgctttccccttcaaccctagctttatgtttgttgtgatggtatagaggtcacacatggcagccttgtgtctgttcttaggctgagttcatctacttagggacggggaatcccagattgggcaaaaccaaaagcagggacagaccttggaaaaattgtaaagcagttcttggttgtgctcacccaccatgacaaaatatgcacacacacaacgcaacacacacacagacattttcatgccttcaaggcctaccctacagcctttcccatggtgccaaacccttcttcttaccttacagtcacttaactgtctctgctggtctcttcccactcatttaggcaacaaatatttattgaaaaacttctctgagccagatggtgccaaacagttacctaaagggcagactgtgtgtgtgccagggctgtttcccgccaacactcccctgcaaattgaaataatttcatccttggaaattcaaaaaaatcatgaaaattgtcactgtgggaaaattccaagtagagctgaaccttctaagaagcagagagttcttcttatggtttagtatttttttaaattatgaatcatttcatgttttttcaacactcggagtttctaaaagtctcacttaggtccaagtgctaggctttgtgctaggtgcttcagtaggaagcaggtggagtcgctgcctcacagaagccagtgtggtggaggaacagacaggcactacaacagctgcagtgtgactagtgccatgtggggcagccgctgggatgggagtacagtggaggcacctgcccagtctgagtggatctcctctgatatattttattcgtgtcatcatggcaaatgttgggggactggcattctagggaacaccatctgcccaggattcacagcaagagggaacttgagggataggaaagtgcaccttggaaaaggtttgatgatagagtgtttgagggcggggggtgggggttcttgtaaaataggaggggcaggttcttctatggccgtggattttactctgagggcttaggaagccattgaattttagaaatttcttctccctgctccagggtctcttggggcctcctacatctccccctaggtacctcctaggtccccactttttctctagctctggaacattctcttccatttcccaccttcacagtcctctggagaaggtctgatctccctcactatgacaggaagccaggctctctcatggtgggtgggggaatgcactatgttcaatgcattggaccagcctggccaacatggtgaaaccccgtctgtactaaaaatacaaaaattagcctggcacagtggcaggtgcctgtcatcccagctacttgggagactgaggcaggagaatcgcttgaacccaggaggtggatgttgcaatgagccaagatcgcgccactgcactccagcctggatgacagagtaagaccctgtctaaaacaaaaagaaaaaagcatcggaggcagcaaagagctggtttgagggactgacttgtgggattctggcttctgaaggattgtagaagtgcctcctaccttgctgagagaaacaggtcttgggcatggggtagggttagggtactaggtttgggagccctgggagaggacaggaggggcatgagctgtgccggcctgggagtctgtgctcaccatcctactctctccccagctcccaaaatggcgatgacaccggcacctggcccaacaaccagtttgacacagagatgctgcaagccatgatcttggcgtccgccagtggtaagtggtgtcagtgtgtgtatggaagagtgggagacctggggttctggggtgcatctcacagccaccatgcccacggactggatgtcaaacctgtgtagtttctccagatctttcggcaggtctgaaaggacccacaattccaaacataaagcctggaattgtggctaaggaacagcagaggggttgggggtcctgggatgcctggaggagagcgaacaaggaaaagactcatggagggaatagtggttacaagtctagctctggaatgggacagtgtagctcaggtcctagctctgctactatccttgggacttggatcgacttgctcaatctctctaaacctcagtttcctcagcctagaaagtggggacagggaccccaaagggttgttgtagagattaaatgagatgataccacaaagcatagagttctgggcctggcgcttggaagccctcaagcaatgaaagtgggtgtagaaatccccagccgagagaacacctcctctttatgcgaggctcctcttttgctgcccctaactccagagtaggattctggttttcccataaggttgactaagggcttcctttgtaatagagattcggctagtggtggttgtccctgaagagtcactagggcccagagcaggagaagaagaatatcatttgtccttaagagcacagcctaagctgggcgtggtggctcacgcctgtaatcccagcactttgggaagctgaggcaggaggatcatgaggtcaggagttcgaaaccggcctggccaacatagtgaaaccctgtctctactaaaaatacaaaaattagctgggcatggtggtgcgtgcctgtagtcccagctacttgggaggctgaggcaggagaatcgcttgaacctgggaggtggctgtggtgagcagaaaatcgcaccactgcactccagcctgggcaacagtctcgctctgtctcaaaaaaaaaaaaaaaaaaaaagagcacaggctttagaggcaggccaatctggattcaaatcctggcacctggcaccaccacttagcaatgagtccttaggtaagttattaaaccccctcggtttcacttactattaatgggcacagtattaacggatctcattgtggtgttaccagggccaaatgcaagtccctcagcacaggattggcagagagtaagggcacaatatattattatctttgctgacccaaacccgttttttactgggtagaaagcagaattagaataatgcctattaataaagactagcttctggagcagcaaatcctgggcttataaggaggctggcagaggatcaaggcattgccctatatcatgaactgatagccctgccctccagcatgtctggaggactggtgggtagagaaccaggtgaaatcacaagaagcactgtcatcacacctgggcacatactaaacaaactttaggggcctcctgtcaatgaatcctctcaatagctctgcaaggcaggtctgatttctcacactcgacagatgagagaaccgagaaggcacttgccccagggtcctcagttttgagctgccaagctgaggttctaacctggctcaactcctaagtttatgctctttctactatagggaccatggctgcctttggatccagcctcggcttctctattacctgagcaggatgagaggctgtcctcttcctcgagctctgctttattcttccagatcagggttgccagataaaatacaggatgcccagttacagttgaatgtcagataaacagcaagtactatttcagcataagtcagtctcaaatgttgcatgagacataatgtactaaaaaaaaaaatgctcattgtttacctgaaattcaaatttaactgggagccctgtacttttatttactaaatctggcaactctaccccagatgtctgtgaggttaagtggggccaggcctacagctgacggaaggacagagagagaggtggcagggactgctggcctcctgaggcagagctgtcccaggtctggtggggctatgattccagagaggccagagactgagtatgaaagtggcaggcggctgggtctgaggagatgccaagttggcctcttgagggaaataaacaggtatatttagctgttgtggccttgcgccctgaggccaggaagcagctttttagcctaaatccagatgttaaaaacagaaatgaaatcagtatttatggccccaaaccctccaagcaagtcatgcagctcgttcccctgtcaaggcctcccacctttggcccacacagggcctgaccctcgtctaagcctgcgccctggggaacggaccctgggggtggaggtggtgggtcaggccctgctctcactttcacacccgcttcctagccctgaaaccagagaggttcctgaagtccagcccagccaggcctgtggggctgctgagaggggttaagtaagagggagagtaaaaaccgacacttgggaggaggcttttaaaataaacatctgcggggagggatgctctcaaggaggctgcggtttgcagctcagccagctgtgttccagctaatcagcctccttgggctactctggagttgctgccttggccctgggatggggtaggttaagaggacagagggaggtcagggagctgggggctgagtttccctgagtagaggctggcacaggagagaaggcatcacccccacctcgtccaggccagaagatgtccagcttcttgaggctctcctaagtctgcctctcctgggaccaagagaaaatcccggtccttgaccaaggtgggccttggggggagtggggtgtagagggaggggcactggagaactgactctacagaaagtcaaagctggcaatccaacttcttcccctcagatttatagatgggaaaacaggcttgagccacgcagagacttgaccaagctcacacagttccttagtggcagagcagagcaaatattctctttcttttacattctggatttccatatcttctctccctcctggtccagcccaacctcagggcaccccccacgaggtgggcgggggatggctttgtcacttgcacccactcggggtgctactcagagatcttgggtgcacataggacgtgggtgggccgagcttctagctactccgtcaggcccttcctgtcattctgtctctgcctcccttctccctgcttctccgtgttcctcctcattcttttctgtgtgcagggagactacaccccccaccccgctctttctctggcgcctctgaggtcccccctctagcccctaaatcactctggaatcctggctctttgaagccagatctgggcccccctcccctaccccttccattcccaggctgggaaaggctgaagaggctgacggctggaggggagggggcggggcggtggcggatctggcttccttttggagttaattagggaaaacagagaaatgtcagcggaatgaaagggctgggggtgggggccagctggggtaggagaggaggaagtgggcagctgctccctcccactcaacccctctcccccgcccccagaaagctctcagctccggggatttgcgacatgaaatgggggctgtagaaacctgagcgctggtgcgtgaagagaaaaaccgaggcgcatcccggctctcccctcccgtgtgccctcctcctcttatgccggcttgaaaatatttcctgtctctctatttctcaatccctggttgatgtcccaggattactcagcctctccggctttagtcactctcgctacccgctcccagggtccagggtggaggcagagggaggctgggagagaagctctactgccagctgggcctgggctggcctgggcatccctgaggttttaactgtctcctaaccacagaggatctcagggcctccagcagcgagccccaatgagtcaaactcttgtttcctcctctcccacccccgacccagtcagggcaggtgaggggtagaggtgatggcatgctggatgtgacggtgttgatgatgtattgcacaggatgaagcaccatctcatttagtcctcacagcagccttcacagtgcgtacaaatcagctggcaattccgagaggctgcattctaaacaagttcctgggtgatgctgagccagggccagagtgtggacttctctgggccccagtttcttcttctgtacagtgggacgttggactggaggtgctgtctgatgtcacctagctgtggcactctgagcctgtgcctaaagtgtccctgagatgtctagtccccgagatcatcatctcctcagcttcatagagccgagctcttctccatcttctctctacctcccattcactcagaacagggataaggtccaagctgctggtggtgatggtgactgactgtcccttccagcatgcgcttaggtacacttgggcctgaatgcccctctaacaaatgctaccgggtatggccttggtccttctaacacttggttccctcatctgtaaaatgagggtcataccacatagctggctgggctgttatgtagaggttaaaagtgattgtgcatgtgaagcatccagcagagtgcctggcacacagtaggtgctcaaatgctgttttgaaatacaaaaattagctgggctagtggtgtgcacctgtaatctcagctactcaggaggttgaggcaggagaatcacttgagcccaggaggcagaggttgcagtgagccgggatcgcgccactgcactccaggctgggcgacagagcaggactccatcttaaaaaaaaaaaaaaaaaaatgctgttttgaaatggaggcttggaagagcactcttcacccccaccccacacacttactaacggaactaccgaatctctactcgtgccaggccttgcttggcaaaggctaggggcatgtaaagccatggtttcatggctgctgccctccaggagcccatggtctagtgtgggagtcagaggctcccttgagaaagccagggcaaggaactgagagcccgtgtcacagccctgagagaaataccagcgaatgtgttttgagcacttacatctaccaggcactattttacgtacctgacatacattttcttatttagcattcactaaaaccagaagaggtggttaccattatcatccccattttgcagatgagaaaactgaagtggcataaggaggttaggtagacttgcccaggatcacagtgagtaaggaaaggagctaggaatcaaacctagactttctcactccagagcctcttaacctctaccctcaactcttgtgaagagagactaccttggtgacccctatattcccagtgctcagcgtggtcaaggcccagggtgctgtataggcattcattaactgctggggatataagacagtgactgttgaggaccctaagtttagctcccacctgatcttcctctgtctctgcagaagctgctgatgggagctccaccctgggagggggtgccggcaccatgggattgagcgcccgctacggaccccagttcaccctgcagcacgtgcccgactaccgccagaatgtctacatcccaggcagcaatgccacactgaccaacgcagctggcaagcgggatggcaaggccccagcaggtggcaatggcaacaagaagaagtcgggcaagaaggagaagaagtaacatggaggccaggccaagagccacagggcggcctctccccaaccagcccagcttctccttacctgcacccaggcctcagagtttcagggctaacccccagaatactggtaggggccaaggccatgctccccttgggaaacagaaacaagtgcccagtcagcacctaccccttcccccccagggggttgaatatgcaaaagcagttccgctgggaacccccatccaatcaactgctgtacccatgggggtagtggggttactgtagacaccaagaaccatttgccacaccccgtttagttacagctgaactcctccatcttccaaatcaatcaggcccatccatcccatgcctccctcctccccaccccactccaacagttcctctttcccgagtaaggtggttggggtgttgaagtaccaagtaacctacaagcctcctagttctgaaaagttggaagggcatcatgacctcttggcctctcctttgattctcaatcttcccccaaagcatggtttggtgccagccccttcacctccttccagagcccaagatcaatgctcaagttttggaggacatgatcaccatccccatggtactgatgcttgctggatttagggagggcattttgctaccaagcctcttcccaacgccctggggaccagtcttctgttttgtttttcattgtttgacgtttccactgcatgccttgacttcccccacctcctcctcaaacaagagactccactgcatgttccaagacagtatggggtggtaagataaggaagggaagtgtgtggatgtggatggtgggggcatggacaaagcttgacacatcaagttatcaaggccttggaggaggctctgtatgtcctcaggggactgacaacatcctccagattccagccataaaccaataactaggctggacccttcccactacataatagggctcagcccaggcagccagctttgggctgagctaacaggaccaatggattaaactggcatttcagtccaaggaagctcgaagcaggtttaggaccaggtccccttgagaggtcagaggggcctctgtgggtgctgggtactccagaggtgccactggtggaagggtcagcggagccccagcaggaagggtgggccagccaggccattcttagtccctgggttggggaggcagggagctagggcagggaccaaatgaacagaaagtctcagcccaggatggggcttcttcaacagggcccctgccctcctgaagcctcagtccttcaccttgccaggtgccgtttctcttccgtgaaggccactgcccaggtccccagtgcgccccctagtggccatagcctggttaaagttccccagtgcctccttgtgcatagaccttcttctcccacccccttctgcccctgggtccccggccatccagcggggctgccagagaaccccagacctgcccttacagtagtgtagcgccccctccctctttcggctggtgtagaatagccagtagtgtagtgcggtgtgcttttacgtgatggcgggtgggcagcgggcggcgggctccgcgcagccgtctgtccttgatctgcccgcggcggcccgtgttgtgttttgtgctgtgtccacgcgctaaggcgaccccctcccccgtactgacttctcctataagcgcttctcttcgcatagtcacgtagctcccaccccaccctcttcctgtgtctcacgcaagttttatactctaatatttatatggctttttttcttcgacaaaaaaataataaaacgtttcttctgaaaagctgaacgtttctgtataagcgatggaagctcctggcatgtgtgcatgaagtgatgagctgaggtgggtgctggaagaagggcggaatcgggaggccactttgtgtcattgcgcgtctagatgtttccgaattgcgtgtgtgtgtgtgactgtgcaatatggttgtgtatgcttgcaatgccgttgtgcctatgagacagtgtgcgattgtgtgcctatggatctgtgtaccgtgtgccattgtgtgatcggtccgctgtgggggtggggatctgagtgcggcgtgtcagtgtgcagtggagtgtgcagtctaagcttgcggctgtctccaggcagaagaggagaccccggcgcgggcgggggcgggttggcgccgggcaaacgccttgggtagaggggagaggacgtttcgttagttcccgccccttcctgactaaaattgcctacccgaagcgccccggagggcttcacgggaggagggtagactctcctttgcccccgcacccccacccccgctgcctaggggttttgggaaagccgcgggagtgggagggaatgcgggaggtgattcttccaaagccaagtctgcagctcgagcctcagtttccccatctggaattcgccttcccgctgacatctccgtagcgaagcctaagaaattggagggctcatcctcttcttgcgggggtcaaggggactgaaaggacgtgcaggaaatgagatccatcgcagactcagctcccctccctccttcctgtcggtgcttttccactcactcgcctgctctcccatctccccgccccctccgcctgcctcctcgaagcactgtgggattccgaggttgctgcagccagagaagctgcagaaaaacacggagctgggggtgaagggggacttaaaaggggaactacccggaaggacccaagaacacaaagacagagccactgcggttatctggctggtcagcaagggtatgcggcttcctccgcgctgcggaggctcccagagccaggtcacccattctgccagctcaagtctgttgtcatgggaaccaaaccttccaacttaagaatctgggggcgactttctagcgtgggaggaagggtggtgtgcacggttgctgagatggaagcagggttttgttactcagagccaggctgcggaggggcggggtgccgggcgcctgggttctattccaggcacagcagcagactggcagagcgcgtgagcagctgtggtttgtcccctaattggtatgtgtgcctataaagctctgaaccagaaaggcgtggcctccggggggacgggagggaggcggcaggcaacccatccccacacctcaggccatactgaggaggcagctgcccaggctccagggctatttaaaaggcttttatttccagttccagagcccgcccgaatgggtttgtggtcctctccaggcctctccctgtctatcctgggcctgctcattgctggtctggcttttttgtgcaggtcataacg

SEQ ID NO: 447 - DNA, 141897 bp, Homo sapiens
  source 1..141897: mol_type = genomic DNA
gtctgcttcaagactgtacctggagttctccccacctacagcgaaaggactttgccttattcctacaatccgtgtgctgcctcacattcctcaaacaccgagtttaaatttctcaatataaaggctgaaaatgctgcaccacaagatcttctatgtgatgaagcctcttggtttgaaagtaatgacaatccagaaatgccttctaattcaggcaatttgcaaaaggtgagtttcttcaaacctttccttccataaatataattgggtttcaattcattgatttagagataaaaagaatacagattaaatattccctgattacattattttattgattttctggtgtagagtagggtgtctaggaaattctttgtagaatttcctgtagaatatctgtgttgcagttgttctttcatagaaagcctccttttgatagtcttgaaacttttcttaatcctaatacactataatctgaaacatttttaatacagtattatctcacactgtcattttcagacatatctatccagaattagacccaaatcctcacaattaagtggtttacttagttttaatgcagtcaatcctaaaatatatgaaacattatgtatatcttaacacatttttaatgtaacctgtatataatatttttacttccctttgcatgtttttaaaagtatacacagatgttgcctatgtcagggcagtttttaacttctatgctaatcaaaagaaataatggcatctaaaatggcaactcttgtaatgggcactgtaatgaattggttcaaaatgtgtttgtgtagcatatgcctgtagtcccagctactcgggaggctgaggtgggaggatcccttgatcccaggaggtagcagctgcaatgagctataattgtgcccctgcactctagcctgggagacagagcgagactttgtctccaaaaaagtgtttgtggttgttggtacccttactgaaaatgggactagcataaatggtggtgaaatgtgatgataattcaaaatttacagaagattgtaatattatttctgttccccaaggtcctaagagatattttcataaaaatgaatggtaaacttcagagaacatttaaaattattcaaaataatctcttacactcttctaaatgcttcattatcttggggagggaaatattatgagtgtcatctctgcagatttagcagaaataaaatcctctgtgtgatagtttcacaaaacgatgcagtattaagttaggactctaagcgtcgctgttgaccaacctgggcaagaaaatcaacggaaactcaagttacatcctccaacaacaaagcaaattagacgggaaagcaggaaagctgtgcagaaattctgacctgaaacgcttcgcatccggtctctgcttgttgaaggaccttcaccgctatttctgagaagagcaaaagtgatgcagatctgttcttcctcttcttaatcccagagaagttcctaataagccagtaatggcgcctccgcagaggcatccgcagcgcagcgagcaggtcctgctcctcacgctcctggggacgctgtggggggccgcggcagcgcagatccgctactctattcccgaggagctggagaaaggctccttcgtaggcaacatcgtcaaggatctgggactggagccccaggagttggcggagcacggagtccgcatcgtctccagaggtaggatgcagcttttctctctgaatccgcgaaacggcagcttggtcaccgcgggtaggatagaccgcgaggagctctgtgctcagagcccgcggtgtctggtgagttttaacatccttgtcgaggataaactgaatctttatcccgtggaagtggaaatagtggacattaatgacaatacaccccgattcttaaaggaagaattggaagtgaaaattctcgaaaacgcagctccatcctctcgttttccactaatggaggtctatgaccctgatgtgggaatgaactcccttcagggatttaagctcagtggtaatagtcacttctcagtggacgtgcaaagcgaagcccatgggcccaagtacccggagctggtgctggagggcacactggaccgggaaggagaagccgtttaccgcctggtccttactgccatggatggcggcgaccctgtccgctcaagcgtcgcccaaattctggtaacagttctagatgtgaatgacaacactccaatgtttactcagcctgtctaccgtgtaagtgttcctgaaaacctgccagtaggcacaccagtgttggcagtgactgccaccgaccaggatgaaggagtccacggggaagtaacttattcctttgtgaagattacagaaaagatctcacaaattttctgtttgaatgttttgactggagaaatttcaacttctgcaaatctagactatgaggactcgagtttttatgagctgggtgttgaagcccgggatgggccaggtcttcgagacagagcgaaagtcttaataactatcttggatgtcaatgataatgtaccagaagtggttgttacatctggaagcagaacaattgctgaaagtgcacctccaggaacagtaatcgccctttttcaagtgttcgatcgagactctggcctgaatggcctggtaacctgttccatcccgagaagtctcccatttgaattggaaaaatcagttggcaattattatcgattagtgacaaatgcagctctagaccgggaagaggtattcttgtacaacatcactgtgacagccacggacaaaggaacaccacctctgtctacagaaacaatcatctctctaaatgtggcagacaccaacgacaacccgcccaccttcccccattcatcctactcagtctatgtccttgaaaacaaccccaggggtgcctccatcttctctgtgaatgcactggaccctgacgtggaccagaacgcccaagtctcctactcactggcagaagacaccctccagggggcgcccctgtcctcctacgtgtccatcaactccgacactgggattctgtacgccctgcgctccttcgactatgagcagttgagagacctacagctgtgggtgacagccagcgacagcggggacccgcctcttagcagcaacgtgtcactgagcctgtttgtgctggaccagaatgacaatgcgcccgagatcctgtaccccgccctccccacagacggttccactggcgtggagctggcgccccgctccgcagagcccggctacctggtgaccaaggtggtggcggtggacagagactcgggccagaacgcctggctgtcctaccgcctgctcaaggccagcgagccaggacttttctcagtgggcctgcacacgggcgaggtgcgcacggcgcgcgccctgctggacagagacgcgctcaagcagagcctagtggtggccgtccaggaccacggccagccccctctctccgccactgtcacgctcaccgtggccgtggccgacaggatccccgacatcctggccgacctgggcagcctcgagccctccgccaaacccaacgattcggacctcactctgtacctggtggtggcggtggccgcggtctcctgcgtcttcctggccttcgtcatcgtgctgctggcgctcagactgcagcgctggcacaagtcacgcctgctgcaggcttcgggaggtggcttagcgagcatgcccggctcgcactttgtgggcgtggaaggggttcgggctttcctgcagacctattcccacgaggtctcactcactgcagactcgcgtaagagtcatctgattttcccccagcccaactatgccgacacgcttatcaaccaggagagctatgagaaaagcgagcctcttctgataactcaggatttacttgaaacgaaaggagaacccaggcaacttcaggtgagtttctttccgcctaagcgggaagagtaatctgatcttcccgcaacccaactaatcagacaggctcatcagctagatcggctgttatagaagcgaacctcttttggtacaggaagattcgtgattttgtaaagtggaagactcccttgttcaggtgagggtatcgtttttttttttttttttttttgagacggagtctcgctctgtcgcccaggccggactgcggactgcagtggcgcaatctcggctcactgcaagctccgcttcccgggttcacgccattctcctgcctcagcctccctagtagctgggactacaggcgcccgccaccgcgcccggctaatttttttgtatttttagtagagacggggtttcaccttgttagccaggatggtctcgatctcctgacctcatgatccacccgcctcggcctcccaaagtgctgggattacaggcgtgagccaccgcgcccggccgagggtatcgtttttattggttgacaggaaaattcaagattgtctttgattagtgcttagttttcttagccctttgcagagagtcacataattctaatgtttttcttttatatcaaaagaatgttctgaagtcttaattttgtgggggaaaataatgcatgtcctagtttttctttacctttctcttcttggcaaactatttgtgtcttggattgagtacatctcgtttcttaggttttttcctactatgtgacatttgtaaggttctttctttttctaatgtgggaaaaaaaataaccttaatttaggtcagtgttaaagatcaagatcttggttttagctagcatggtggttcacgcctgtaatcccacctcttcaggaggctgaggcaggaggatcccttgagaccaggagtttgagaccagcctgggtgactctgtctctaccaaaaagaaaaaaaagtagccagatgtgtggcgtacacctgtagtcccagctactcgagaagctctgataggaggattgcttaagtccaggggtatgaggctgcagtgagatataattgtgtcactgcaccctagcctgggagacagaatgagactttttctctctctctctcaaaaaaaaaaaaagattttgttttttctcagtgttacttgataactataaacgacagacgttcatacaagagatctttcacctttactacttaggaatcaaaaattatttttgaaaagataagaatcattggtaactgcagcaggggacaccagatctttggtgttaaaagacctgaataacattcctgtaactatctgttatttacttgggccagttacaatcgccattatcttccaattaaaattaagatttaaaagacttctcttatcagagataggatccccctctgttgcccagtctggagtaaaaatccacctgtaactgctgcttatagagtgtgtatccagggcaacttgaatctatgttcctgggttgcaatcctaaagcttggctcaaataagctctacttatattattttttaaaacaagactttccttatctatctgactcaaattctaagaaaataattttataactttttttcaaactctaaagcagcatagtgaacacgtatttgttgacatcaccattattataattattgggttgttaacaataactaagcaccgatgctgtgtgcctactacagtgtcttttgcatactgtgtgcctgatagtatttaagagtgaaaatggccgggtgcggtggctcatgcctgtaatcccaacactttgggaggccaaggcaggcatctcacgaagtcaggagttcgagaccagcctgaccaacatggtgaaaccccgtctctactaaaaatacaaaaattagccaggtggggtggcatgggcctgtaatcgcagctactcgggaggctgaggcaggagaatcgcttgaacccatgaggcagaggttgcagtgagccaagatcgtgccactgcactccagtctgggtgacagagcgagactctgtctcaaaaaataataatgataattaataaataaagagtgaacatgaattttaaaacatgctcggtagtgtctgcttacaggacatatctctaaaaatagatgactgactggtgaatgggagaacaaatgttaatgaggttcaaataaaaatttaaatattttagcattttaacccagacaataaggctttcatcatataggaactctttattgaaatatttcaagaaaaaagggattatcatttagaagactgattagtcttatttattatgactgaaatgtgcaaacagaatcattgtttcatgaacagaaaacagcagagtttttgactgtcaatgatgttcgaatagaaaatggatcactaaggagataggagattctgttatcgacagtcttcaaaagtaagttgatggccctggaatgaatggagtacaggggattctctaatttgatgacttgttgaactacattatagtcaagatttttctccagtcatgagttggaagattctacaatctggtggtattatagaatggattggccacttgtgcatctgaatttgttatgaatgtgtaagaaaaaagcaattgagaagataccttgaaaataaatgagaacctcctttgtaacctgactttgtcagtcttcttaaagataacattgagttgatgtgtttttaaataagctgctaagagtaatatgtgtttttctgaaccaatattgtggtatttacatttaaggaattgttatagatttatttatttcaagtttccaaaggtatatacctaaacaagagatctaatcatacacatcttcaaagctcattttcttgtatctttgtgatataatttgataaaataacaattttaaacaacttgaatcttggatattagtctcatgagttagatgggctgttatacatatgattatttcataaactctgaaagtgtgaatgttattttactatactaccaatttgggatgttaaactacatcttgagcatttgttgttatagggaaagctcactaactacttttcatggagatcaggctggtttattttattctcttattacctgtgaccatttcatttaaacaaataaaatatttctctgatggaaaaactaccaacttctactctcacaaaagtcattcactcatgtggactgaccaactgttaaacatcctggcagtcatggaatttgctaagttatggctaaatgaggttctttaatccacctgcaatacagatcattaataataagataggctatctgaggttttgagagttcagtatagaattttgaagcatcaggaaaaaaaactaccaaattattgtcttattcttattttatggtctgtgaaagcctcttttttttttttttttttttttttttttttgtcagagtcttgctctgtctcccaggctggaatgcagtggtgtgatctctgctcactgcaacttcctcctcctgggttcaagcgattctcctgcctcagcctcccaagtagctgggattacaggtgcatgccaccatgcctagctaattttcatacttttagtagagatggggttttaccatgatggccaggctggtctcaaactcctgaccttaagtgatccacccgcctcagcctctcaaagggctgggattacaggcatgagccactgagcccggcctgaaaggcattcatttctgatcaggcttctgttgaggtggcaattgtcaaaggggaaggagtaaaatctcagaggagaaacattggaagatacctatatctttgcttgagaatgaaaatctaaatggaacttcaaagaactgttttgttgtttgttttttagaaaaaaaagtcccaaaaaagaaaagagagaagataatcaattcgatgcccaggaagccaaatagactttacatagaattctttttaatgcaaccaaacaaatggtcaggattcttcccaatatctcagtcaacaataatatacactctttaaactatgaaatgatttcaatttgatacaatgagcttatgttagattttattaaacatatcttggcggtctagtaaagatctttaatatttaattttatgatgttcgataacttagaaaatgtgaatgctagagacaatgaagccatttactccatagggtatgtatgctttgtgttcggagtagtctataatttaatttaactagctcttatttccttttctccaaagaaggtaccaagacactataaattaattgagacttttttaaaacagtagaataagaaacaaatgtgagatgaaactatgaattttgaggcatcaggtaaaaatggatcaagacattgagagctataacctccaaacatgaaagtttgtttgaaaatatctacaagtgcttacattgtttaataatcatacactttgcttgcctcaacaagaagttcaaaagtactattaaacaaatagaatttaactccagtttacagaattcatctataatacctctattagttcctttaaacaaaatttatctactttgtgaatgcaaagataactatggattattttgatagatcaaaacagaatgtccttcaaagtgttccctgtattctggagcaatgccaccagaaagcagaaataggttacttaggagcctcccacaaaacgaagttaagctttcttagtgttagttctggattctcctcctggttccaccaactactctccaggacctagaagaatttacaaaccaagactgtttcttgccaggtctttattccagagcaggtcattctcttttattctgcaactatgtgaaaggagctttcttttctttctgctagcagagggtagcctcggatccatcaataatttagttttactctatcaacatcagtggagagacgagtacctctaaggatcctgtcaggacagtcctgcattttgctcaaatgctgtctagagatccctgttttctcaattacactagaatagagtaggatgaagatttgaattgcatactaggatgaagacttgaattgaattgcataatgaaaagaatcagccaatccattatccagtttcttatgaattcacagcccagtaggatctctgcagatttctgccttctgtagaaaatgggttgcttctatagctgattgctgcagccaagacaaacaacgatttctttctttttttctcacaagactgggagtgagaatatttggattccgacattgttctactactatataatcaataatcaggaacaaggcaaggcaattccctctttctttctttctttctttcttcttcttttttttttttttttttttttggcagagttttgctcttgttgtccaggctggagtgcaatggtgtgatctcggctcaccacaacctccacctcccgggttcaagcgattttcctgcctcagcctcctgagtagctgggattacaggcgcgcgccaccacgcccggataattttgtatttttagtagagacggggtttctccatgttggtcaggctggtctcaagctcccgacctcaggtgatccgcccgcctcggcctcacaaagtgtgggattacaggcgtgagcaacagcacctggccccccctctcattttttaaacggttaaaatgaaggtgttagaccgtctctaaggttctatacaatcaaaaatttattaaaataggtctatatattttacaacaattttgactttctgaatcttgcatcatggtgtctagaacatatgtgttcaattaatactgaattaattaaaatttatatacactgatgtaaatattttctaagtaaaatctttcatatgtatttaaataaaatttacctttttgccttcaataactgattttcccatgtgcaataacgtgtgagtcagtgcccaaaagagtcacttgaaagttgcaaggcaaagcagttttttaaaaattatctaagattatcaaacaccggtccatgaacactgttgcattaattcagtgtcttaaaatggatttttaattatcagggatatctagagcaaagaaatctaacagggaaattttgaaagatgaaacaattttctatgaaatcagtgtattgtgtgcatcaatgtggtgcagtaacttagtaaggactcacagcgccgctgttcaccaaccagggaaaaatggtgcgagagatcccacagaaaccaccgagttttacagcacagagaaacgacagattgcgataagccctcttccaggctgcactaaactcaagcctctatcctgctggattctgagctccccttcctaagacagaggggtccacccggatacacccgcattctgaagcacttcccgagatcggcgcctaagcaagagaagcaggacgactatggcggctcagccgaggggcggggactacagaggattcttcctgctctccatcctcctggggaccccctgggaagcctgggcaggacgtattctctactccgtgtcggaggagacggacaaagggtcctttgtgggagacatcgccaaggacctggggctggagccccgggagctggcggagcgcggagtccgcatcatctccagaggtaggacgcagcttttcgccctgaaccagcgcagcggcagcttggtcactgcgggcaggatagaccgggaagagatctgcgctcagagtgcgcggtgtctggtaaactttaacatcctgatggaagataaaatgaatctttaccctatagacgtggaaataatagatattaatgacaacgttccaagattcttgacggaagaaataaatgtaaaaataatggagaatacagctcctggggttcggtttccgttaagcgaggctggggatccagatgtgggcacgaactccctccagagttaccagctcagccccaatcgccacttctccctggctgtgcaaagtggagacgatgaaactaagtacccggaactggtgctggagcgggtgctggaccgggaggaagagcgggttcaccacctggtcctcacagcctctgatggcggcgacccgccccgatccagcaccgcccacatccaggtgacagtggtggatgtgaatgaccacacgcctgtcttctctctgcctcagtaccaagtaactgtccccgagaatgtgccagtgggtacaagactgctcacggtacatgctatcgacctggacgagggagtcaatggggaagtgacatattcttttcggaaaataactcctaaacttccaaagatgtttcatctgaactcgcttacaggagaaatatcaactttagaaggattagattatgaagaaactgccttctatgaaatggaggttcaggctcaagatggtcctggtagtctgacaaaggcaaaagtactgatcacagttttagatgtaaatgataatgctccagaagtgactatgacgtctttaagtagctcaatccctgaagacacacctcttgggacagtcattgctcttttctacctacaagacagagattctggaaagaatggtgaggtgacctgcaccattccagaaaacctaccttttaaattagaaaaatcaatagataattattatagattggtcacaaccaaaaacttggaccgggaaacactctctttgtataacatcacactgaaagccacagatggtggaactcctcccttgtccagggaaactcacatattcatgcaggtggcagacaccaacgataacccacccaccttcccccactcatcctactcagtctacatcgctgagaacaaccccagaggggcctccattttcttagtgactgcacaggaccacgacagtgaggataatgcccagatcacttattccttggccgaagacaccatccagggggctccagtgtcctcctatgtctccataaactctgacactggagtcctgtacgcgctgcaatcctttgattatgagcagttgagagaactacaactaagagtgactgcacatgacagcggggacccgcctctcagcagcaacatgtcactgagcctgttcgtgctggaccagaatgacaacccgcccgagatcctgtacccggccctccccacagatggttctactggcatggagctggcaccccgctccgcagagcccggctacctggtgaccaaggtggtggcggtggacaaagattcaggccagaacgcctggctgtcatacctcctgcttaaggccagcgagccaggactctttgcggttgggctgtacacgggcgaggtgcgcacggctcgggccctgctggacagagatgccctcaagcagagcctcgtggtggccgtccaggaccacggtcagcctcctctgtcagccaccgtcacactcaccgtggctgtggctgacagcatccccgaagtcttggccgacctgggcagccttgagccctccgacggtccttacaactatgacctcacgttgtacctggtggtggcggtggccacagtctcctgcgtcttcctagccttcgtcctcgtactgctggcgctcaggctgcggcgctggcacaagtcacgcctgctgcaggcttcagaaggtggcttggcgaacgtgcccacctcgcactttgtgggcatggacggggtgcaggctttcctgcagacctattcccatgaggtctccctcaccgcggactctcggaagagtcacctgatcttcccccagcccaactatgtagacatgctcatcagccaggagagctgtgagaaaaatgattctttgctaacatccgtagattttcaggaatgtaaagaaaacctgccaagtattcaggtgagcccagcccttcctttatttccatgaggaatttatttgcatgatatttctctattattttgcaaaacaaatgttttgaaaatagggatttaaaaaactttatagaggtaaaaatgagtttaccagtttccttcagtggtgacactttaatatagaacacataggatatagtatttctttagtgaaagcctatggacaagattatgaatatgtggactatcacattttataatttccacctactttccaatctatgttccaacctactttcttaactcatatattttatacattggaatgaatcgagtctttcatattgcacaaggttagcaggaataaaacacacctcagctgtcttctcaggattctctttagcattcaaatatgtaaaaggttctgaaagatttcttccatgtgaagatttttttctgtggctgattctgcctccatgtacctcagcttggtggtcctaaaaaatcttgattgcttcttgacctatttacagtataatcatttattaatggggtggtagtagaaggttggatttatgcctaaagaatgaaatgtgtgtgtatcacacttcactaagatctatatcaaagacagacatcaagtctaatgccacactaaaggccatcggacaaaaccaataaaatatgtcaaataaaatgtcattttaagtgttgtaattggcatttgtgacataggcaattacatgttttaacagagaattccagtatgttgttttagtggtacagccagatgaagtgtgtctgtgggctatcaaagtgggagattggggatactggctttgtttcaactgtctcacgtactcaaaccttagaccatcttatgtacacagatcctagaccagtagttgattttatttattaggtctactgaaaaattcagttggaaataacccaatctgggattaactacttccatattcttttgtataacattttagtaaagctcagtatatcaagtgattgtcatccagaaggggtggatgacaaggtaatcttgattccagagacctttgagtattaattaaaaacacacttttagccaggtatggtgttgcaagctgtagcccacctgcatgggaggctgaggcaagaggacagcttgaacccaagaattggaggcccacctagataatataacaagactctgtctcttcaaaaaaagactctttttagactagtgttgtatttggtagtattttgcacatgatagactctgtacaatagtgtgggggatacattttttttttttgacatggagtctcgctctgtcacccaggctggatacattttacaagttctgcagtgttcacatttcagatgtacaatcacttggggtagaagacaatgttgctgacaccaacaatgttactgagggaagatcctatggcagaactacggttataaggtattttgtaaaagaaaatctcctgaccaaaatttattagatgcataaaattgtttttaagcaatggagagacataatcactaaactcagtgagctattgcaatcaaactttccagggattgtttccttcaattcagaggtcaccaaggaatgtaaaataagtgcagaggtaggaagcagtgcttcagtgcagcagatctcagtgactttgtgttttgaggctatgtattatccccctgataactttgaagatgaatgttgtatttcataaccagtaaaataattgtgtaatgaggagaggagtaggctactgcctgtgatcatcgaaatgagaatcacataatattcctgtaatgaaatcactgaaactattgggaagggggtgtatttgaagataagtataaattgcaccttctaaaaggcaattttggtattactgatactctccggaaaaagttgaaataaatcaacttggaggtacttagaaaagtggagaaaatgttaggaacaatgaaagaaagataaaatgtatccagtatatttctaatgagtaagtatggaaaattactgtactctgagacggtttaggccaagtctgtgttatggctatctttatatagatagtgcatgtttgaagattggggaaagcttatgtcaataaatgtttatgtacttaatctacatgatttgcctaaaaatcctcaaagttgggatgaaggcattcctaagagtacatttttagacgtcattaaatatacagacgtatccacgtagtttttgttctttcagttaggcacacaattataattattgcactggttaacttgaagcagcagaggctgtagtttcctagtgctgactctgggcgccgctgttggccaaagtggagagcttggcgctccagatctcctcgcgcagccgcagcgcgctttccagggcagccccagctcagactccccagcgccagcctttacaccgcttcctcctcggaaaaagaagaattttttcttgaactggaactgcaactaaagtccgttcggagatccaaaaatctgcaatacagaggttatttgtaacccggcgtctccaggctggtgagcaagctgaggagagcaagagggatggggagcggcgccggggagctgggccgggctgagaggctgccagtgctctttctcttcctgctgtctttgttctgcccggcgctctgtgagcagatccgctacaggattcccgaggaaatgcccaagggctccgtagtggggaacctcgccacggacctggggttcagcgtccaggagttaccgactcgaaaactgcgcgtcagttcggagaagccttacttcaccgtgagcgcagagagcggggagttgcttgtgagcagcaggctagacagggaggagatatgcgggaagaagccagcttgtgctctggaatttgaggctgttgctgaaaatccactgaacttttatcacgtgaatgtggagatcgaggacattaatgaccacacgccaaaattcacgcaaaattcctttgagctgcaaataagtgagtctgcacagcctggcacacgatttatattaggatctgcccatgatgcggatattggtagcaacacactgcagaattaccaactcagtcccagtgatcatttctcactgataaataaagagaaatcagatggcagtaaataccctgagatggtattgaagacacctttggacagagaaaagcagaaatcctaccacttgactttgactgccttggactttggagctccacccctaagcagcactgcacagatacacgttctagtgactgatgccaatgataatgctccagtgttcagtcaagacgtatacagggtgagcctttcagaaaacgtgtacccggggaccacggtgctacaggtgactgccacggaccaggatgagggtgtcaatgccgagattactttctctttcagtgaagctagccagatcacccaatttgacctgaactctaacaccggggaaattactgttttaaatacattagattttgaagaagtcaaagaatattccatagttttggaagcaagggacggtggaggaatgattgcgcaatgcacagtggaggtagaagtcatagatgaaaatgacaacgccccagaagtgatattccagtctctacccaacctaattatggaggacgccgagctgggaacacatattgctttgctcaaagtccgtgacaaggattccagacacaatggagaagtgacttgtaaattggaaggtgatgttccatttaaaatattaacttcttcaagaaacacgtataaattagtgacagatgctgttctagaccgcgagcagaatccagagtacaatataaccgttacggcaacagatcggggcaagcctcccctctcctccagttccagcatcaccctgcacattggtgatgtaaatgacaacgctccggttttctcacagtcttcctatatagtccacgtggccgagaacaacccgcctggagcctctatttcacaagtcagggcttctgatccggacttggggcccaacggccaagtctcttactgcatcatggccagtgacctggagcagcgggagctgtcatcctacgtgtccataagcgcggagagcggggtggtgttcgcgcagcgcgccttcgaccacgagcagctgcgcgccttcgaactcacactgcaggcccgcgaccagggctcgccagcgctcagcgcgaacgtgagcctgcgcgtgttagtggacgaccgcaacgacaatgcgccacgggtgctgtaccccgcgctgggtcccgacggctctgcgctcttcgatatggtgccgcacgctgcagagcctggctacttggtgaccaaggtagtggcggtggacgcagactcaggacacaacgcctggctgtcctaccacgtgctgcaggctagcgagcccgggctcttcagcctggggctgcgcacgggcgaagtgcgcacagcgcgtgccttaggcgacagggacgccgtccgccagcgccttctggtcgccgtgcgtgacggtggacagccaccactctcggccactgccacgttgcacctggtcttcgccgacagcttgcaggaggtgctgccggatatcactgaccgccccgacccctctgacctccaggctgagctgcagttttacctagtggtggccttggccttgatctcagtgctcttcctcgtggccatgattctggccattgccttgcgcctgcgacgctcctccagccccgcctcctggagctgcttccagcctggtctctgtgttaaatccgaatccgtggttccccccaactacagcgaggggactttgccttattcctacaatctatgtgttgcacatacaggaaagacggagtttaatttcctaaaatgtagtgagcagttgagttcaggacaagacatactttgcggtgattcatctggggccttatttccactttgtaattccagtgaattgacttcccatcaggtgagtttcctttaagtataatttaatgctcattgcctacccatttctccatattcacaagaaaatatacatatttgcaggaaaatatataatttttagatgtcatggatcattttaggaaagttgtagtcagttaaaaagctgtcatatcattctacaaaggaggagtaaagtaggagcaattgtgtggcccaacatttgtttgttttttagccaagcttagatttataaagcaatgagggtgtggttttaaccacaaagtgaaagtgttagacagttgttggctctctcctaaaaagtgaatgagatttttcctatacattttccttcttgttgactaatatatgatgaatacttttttcagcttggatataccataaatataaaaataataaagccaaagaatttaagctaaaattcaacacttttcttaactaatttaactggtatggtctccatagtagtccactgttttgtttcctgtgttaacttcccttttgtttcaaaagctcttagaataaggagtcaactggatttttatgtccatggaccccttgtgattatatgcagtgtacgctgtgtgtgcgtgtgtgtgtgtgtgtgtgtgagagagatccttttacttagaaaaaggtctactatgctcattagaagatcaaaagcagattctccttacttgtaacataggagtttcaggattaatctgtattcaagctcattctatatccttcatcaaagaaaagacaatgttttgtgtctgttgtccctctcacacacagccctaatatataatgtgtaactgccttatctgcagccctaaactaatatagctagaggtcttctaatcattctcctacctctaggaaagaaatatagtcttgaaaactgccaatctggtgtgcatacaaaatatatacaaaataccaaggaacattatatgagccttttgctaggtatatctaagcaactgcttcagttaatggccactttacaaattgctgaaagaaggaaacgtctttcgattcttttttttttctttttttttttttgagacagagtctctgtctgttactcaggctgtagtgcagtggcacaatgatagctccctccagcctcaaactcctgggctcaagcattccttctgcatcagcctcctgactagctggaactcaggctcatgccaccagacctggctaatttttctgttttcagtagagaaaatattttctttcactaatttaactggtatggtttccattgtctacccagttttccatatgcataagaaaatatattcacaggaaaatataaagttttcagatttcatgagtggttttaagaaagttttagtcagtgaaaaaactatcataccagtcttcaaaggaagggtgaaataagttcatctgctacgttgcccaggctggtcttgaagggaaacagacttttttgtagtcatacttatcctttggcttcttagtaagtattatatagtcattactttttgcagttttttagatcaaagtgttaatgtaggtaaagttaattttagaatatatgtaaaagtcaagtctgctttaaatttaatcatctctttggtgaaagggatgggatggagctttgctttttatcatatattcatctgtacctttcaagtattcaaatagaaaaatataaacaatgtaaataaaatagcaaaacaatgtaatatctcataaaactgcaatggtaaaagcatttatcctattgaaattccacaatttttatttgaaaatattatcgacatgtaattcaagtggcatttagaagaataatttaaaagcaacaactctatagaaagcttgtaaaatgattaagtagtttaaaccaaataaaacaatttctgagtcagtcatctccagtaggtctattttagtctcaagataaattcatttctggtgacaactgaagttcttagttatttgttagtatatattggagacatttacaataaagcttagagcacaatgggaaatgaaagtatcatgttttttttaagaccaaatgtattgcagaaatgtgagtaatttaatccgatgctacaatctgatcattctgatctaatctgatcatttaataacactaaataaaaccttcatctcacattctttggctgtttcttttaaaatatgggtttacggataaatcaaataaattcaaaacaaagtaataagcaaatgatttttttttctcagtaatctagtagagtattacatttagaagtaatctgtatctcagtgcagtaactatttaggactgtaagcgccgctgttcacctactggaagacaaatgcaaccgaaaacactcagatctcacacctcacgaagacccgcagatgccacaaactaactgctggactgcagcgaaacccgacccctgtttggaggcactccaggtttccggaggattgtcatctccatagctgcggcaagaaactaaataagacccatttatgcacagtgaagattctgagaggattctgcagcaaaacaacaatggccgctccacagagtcgccccagacgcggcgagctgatcctgctgtgcgcgctgctgggaacgctgtgggaaatcgggaggggacagattcgctactctgtgccagaagagacggacaaaggctccttcgtgggtaatatctccaaggacctggggctggacccccggaagctggcgaagcacggagtccgtatcgtctccagaggtaggacgcagctctttgctctgaacccgcgcagcggcagcttgatcaccgcgggcaggatagatcgggaggagctctgcgctcagagcccgcggtgtctgataaatattaacaccctggttgaggataaaggaaaactctttggggtagaaatagaaataattgatattaacgataataacccaaaattccaggtcgaagatctagaagtaaaaattaacgaaatcgcggttcctggagcacgttatccactcccagaagctgttgacccggatgtgggcgtgaactccctccagagctaccagctcagccccaatcaccacttctccctggacgtgcagactggagacaatggagccataaacccagagctggtgctggagcgcgccctggacagggaggaagaggctgctcaccacctggtcctcacggcctcggatggcggcaagccgcctcgctctagcacagtgcgcatccacgtgacagtgttggatacaaatgacaatgccccggtttttcctcacccgatttaccgagtgaaagtccttgagaacatgcccccaggcacgcggctgcttactgtaacagccagcgacccggatgagggaatcaacggaaaagtggcatacaaattccggaaaattaatgaaaaacaaactccgttattccagcttaatgaaaatactggggaaatatcaatagcaaaaagtctagattatgaagaatgttcattttatgaaatggaaatacaagccgaagatgtgggggcacttctggggaggaccaaattgctcatttcggtggaagatgtaaatgacaatagaccagaagtgatcattacgtctttgtttagcccagtgttagaaaattctcttcccgggacagtaattgccttcttgagtgtgcatgaccaagactctggaaagaatggtcaagttgtctgttacacacgtgataatttaccttttaaattagaaaagtcaataggtaattattatagattagtgacaaggaaatatttggaccgagaaaatgtctctatctacaatatcacagtgatggcctcagatctaggaacaccacctctgtccactgaaactcaaatcgctctgcacgtggcagacattaacgacaaccctcctactttccctcatgcctcctactcagcgtatatcctagagaacaacctgagaggagcctccatcttttccttgactgcacacgaccccgacagccaggagaatgcccaggtcacttactctgtgaccgaggacacgctgcagggggcgcccctgtcctcgtatatctccatcaactctgacaccggtgtcctgtatgcgctgcaatctttcgactatgagcagatccgagacctgcagctactggtaacagccagcgacagcggggacccgcccctcagcagcaacatgtcactgagcctgttcgtgctggaccagaatgacaacgcgcccgagatcctgtaccccgccctccccacagacggttccactggcgtggagctggcgccccgctccgcagagcgtggctacctggtgaccaaggtggtggcggtggacagagactcgggccagaacgcctggctgtcctaccgcctgctcaaggccagcgagccgggactcttctcggtgggtctgcacacgggcgaggtgcgcacggcgcgagccctgctggacagagatgcgctcaagcagagcctcgtggtggccgtccaggaccatggccagccccctctctccgccactgtcacgctcaccgtagccgtggctgacagcatccccgaagtcctgaccgagttgggcagtctgaagccttcggtcgacccgaacgattcgagccttacactctatctcgtggtggcagtggctgccatctcctgtgtcttcctcgcctttgtcgctgtgcttctggggctcaggctgaggcgctggcacaagtcacgcctgctccaggattccggtggcagattggtaggcgtgcctgcctcacattttgtgggtgttgaggaggtacaggctttcctgcagacctattcccaggaagtctccctcaccgccgactcgcggaagagtcacctgatctttccccagcccaactacgcagacatgctcatcagtcaggagggctgtgagaaaaatgattctttgttaacatccgtagattttcatgaatataagaatgaagctgatcatggtcaggtgagtttagttctttgcttgcttttaatttccagatgaattttatttggcataaattatgttttgaaaaacattgtgaagatagttgaaaataatttttaaggtgtatcacagagttttgggtttattttggtggtgttactataaaattgaactctaatagtcataggttattgtttcatttgcttttaaacgacttggaaaagattgttcaaccattttaagccttccagtattttattcctattatcactcattcacttaagaagtagctacccgtccatactggtaattttgctattgtttgtgtgtgtgtgtgtgtgtgtgtgtgtgtgtgtgtgtgtgtgtgtgtgtatcccaaactagaacttcagaaaattatcaagaagtctaaagccttgttattagcttagcaaaagtaaaatatatctcagaatttttagggttatgtttagcatttgaacctgtaactaggctcttgtagatttcttcactttaaacctcttttctgagccctgtttctgtaccagtgcccttcaaaactttaatacttcttaccatccttcaaaacatgaacaaactttaaagatggatcttggtgggagatgagactggttactaaatattaagtatgtgagtcagtggtcacctgggctccatgcccatggagacatgaaatctaaagcctagaatgtccattgctcccccaaacaaaaaacaaaagcaaaaacattagatctgaattaaaatgtaattttaaactgttgaaagtgacttttgtaaaatatgtaagaacatatttcaatacaattccaattagctgtttcggttgtgcattgatgtgaagtggtgagaatgttgatattaagaaccaatgtttcaggtacacaagttctaaataagctgatcaattcaattaaagttattcagtcttggctggacacagtgcctcatgtctgaaatcccagcactttgggaggctggggcaggaggaccgcttgagccccgggggtttgaaactgcagtgagctatgatcatgccactgcactccagcctaggtggcagaactagaccctgtctctaaaaaaactattattaggccgggtgcggtggctcacgcctgtaatcccagcactttgggagactgaggtgggtggatcacctgaggtcaggagttcaagatcagcctggcaaacatggtgaaaccccgtctctactaaaaactacaaaaattagccaggcatggtggcatgcgcctgtggtcccagctactcgggaggctgaggcagaagaatcacttgaacccgggaggtggaggttgcagtgagcctcgatcctgtcactgcactccagcctgggcaacagggtgagactccgtctcaaaaaaaaaaaaaactaatattaatagtaaaaactcggtataggctatccattattgtattcctgcataccttcttgtagcatttgaataaagctaatacctgaattgattgttgtaaggtagaagtagatgacccaataaatgtttgttattaatgaaaaggacatttcctaaggattgtgtagtgttctactgtatggtgcatattcagtggagtgggagttaacttcatagtttgtgtaccatttggatgcacatttgagaggacaacatattattggcactttgcaattttaaaaactcggatgaaagttgccctggtaggaaagaaaatccttactctccctaaaaatgttggctagttgtttttattaatctgacaaatggactaaagaaggttgaccaatgtccacaaatttatgtaaatgaacttatgagcttcatttatccaattccaaagtcatttcagataggataataatgcaatccactagaatatccctttgtaccttgtattgcagaatagataagcatttccccaataactcttaagaatgaatttatgtactgtaaaagatatgacataagagaagtattttgagatatgaagaagagcaacgtagtagggtatatcatttcttagctacatcatatgggcagtatacttgaatgaatatttcctgaagtagaagagtaaagaaaaattatttttataaagaatgttaatatagtcaggaagaggagatgtttggggattggtataaaattgccacaactttacaaaatagttttaaatagtatagatttccctaatatgtgtaatataaaacactagaaatattggggagttggaaatcatagaaatgaacagaagaatgataaaattgtttccatagctaataaaaaatgaatttttgaaatcagtatagtatgaaggctctgagagcaagaactgtatcatattaattattatattgccagtgacaagggcaatacttagttctagctaagagttcaaggtatgtttgcagaatggtgaaagaatggaccaatgtatgcaggtttgtataaaaacccaacgtgatatttctaacaatttggaaaacagagaaagataccttaaagaagttgttataattttttattaagtatatggacgtaaaaacttggcttgttaagttaggcacacaaaaacaattactgcactggttaacttgaagccgcagaggctgtagtttcctagtgctgactctgggcgccgctgttggccaaagtgcagagcttggcgctccagatctcctcgcgcagccgcagcgcgctttccagggcagccccagctcagactccccagcgccggcctttacaccgcttcctcctcggaaaaagaatcgtttcctaaactggaactggaactaaagcccgttcggagatccaaaaatctacaatacagaggttatttgtaacctggcgtctccaggctggtgagcaagctgaggagagcaagagggatggggagcggcgccggggagctgggccgggctgagaggctgccagtgctctttctcttcctgctgtctttgttctgcccggcgctctgtgagcagatccgctacaggattcccgaggaaatgcccaagggctccgtagtggggaacctcgccacggacctggggttcagcgtccaggagttaccgactcgaaaactgcgcgtcagttcggagaagccttacttcaccgtgagcgcagagagcggggagttgcttgtgagcagcaggctagacagggaggagatatgcgggaagaagccagcttgtgctctggaatttgaggctgttgctgaaaatccactgaacttttatcacgtgaatgtggagatcgaggacattaatgaccacacgccaaaattcacgcaaaattcctttgagctgcaaataagtgagtctgcacagcctggcacaagatttatactagaagtagcagaagatgcagatattggcttaaactctctgcagaagtataaactctctcttaacccaagtttctcattaataattaaggagaaacaggatggtagtaaatacccggaactggcactggagaaaaccttagaccgggaacaacagagttaccatcgtttagtcctgactgccttggacggtggacatccacccctaagcggcaccactgagctccggatccaggtaaccgacgccaatgataatcccccggtattcaaccgagacgtgtacagagtcagccttcgggaaaacgtgccaccaggcaccactgtgttgcaagtgtcagccactgaccaagacgagggcatcaactcagaaattacttattccttctacagaaccgggcaaatctttagtctgaattcaaagagcggagaaattaccactcaaaagaaactggattttgaagagaccaaggaatattcaatggttgtagaagggagggatggtggtggactggttgcacaatgtacagttgaaattaatattcaagatgaaaatgacaatagcccagaagttacattccattctctacttgaaatgattctggaaaacgcggtgcctggaacactaattgctttgatcaaaatacatgaccaagattctggggaaaatggggaggttaattgtcaattacaaggcgaagtcccttttaagattatctcttcatccaaaaattcgtataagttggtaacagatggaaccctagaccgagagcaaaccccggagtacaatgtcaccatcacagccacagacaggggcaagccgcccctctcctccagcataagcgtcatcctacatatcagagacgtcaacgataacgctccggttttccaccaggcgtcctacttagtcagtgtacccgaaaacaaccctcctggggcctccatcgcgcaagtctgcgcctcggacctggacttggggttgaacggccaagtctcctactctatcatggccagcgacctagagcctctggcactggcctcttacgtgtccatgagcgcgcaaagtggggtggtgttcgcgcagcgcgcctttgactacgagcagctgcgcaccttcgaactcacactacaggcccgcgaccagggctcgcctgcgctcagcgcaaacgtgagcctgcgcgtgttggtgggcgaccgaaacgacaacgcaccgcgggtgctgtaccccgcgctgggtcccgacggctctgcgctcttcgatatggtgccgcgcgctgcagagcccggctacctggtgaccaaggtagtggccgtggacgcagactcaggacacaacgcctggctgtcctaccacgtgctgcaggctagcgagcccgggctcttcagcctggggctgcgcacaggagaggtgcgcacagcgcgtgccttgggcgacagggacgcggcccgccagcgcctgctggttgctgtgcgtgatggtggacagccgccactctccgccaccgccacgctgcacttggtctttgctgacagcttgcaggaggtgctgccggatatcactgaccgccctgtaccctctgacccccaggctgagctgcagttttacctagtggtggccttggccttgatctcagtgctcttcctcctggccgtgattctggccgttgccttgcgcctgcgacgctcctccagccctgccgcctggagctgcttccaacctggtctctgtgtcaagtctggacctgtggttccccccaactacagtcaggggactttgccttattcctacaacctatgtgttgcacatacaggaaagacggagtttaatttcctaaaatgtagtgagcaattgagttcaggacaagacatactttgtggtgattcatctggggccttatttccactttgtaattccagcgagtcgacttcccatcctgagttggtgagtttcatttatgtctattctttttcattacccacccaattttctgtatttacatgaaactatcgtacattttcaagtccaatgagttgtcttagggaagtcagagctgctcagaaagctgtcctaccattctttaagaggagcagtaaattgtgagtttttatgtcgcataaaagaagtagccttatagatttacaaagtagtgagagtttgctcttagcttcctctctagcaaaaacatttggtgcgtttttttgtcctctttctcaaagctaatgaattttacctattcgttgtctcattctttaacatgtttatattttattgtatgtagataaaccattaaatttaatgtatgtaatcatttaattcatcttttaaagcaaagaaactgctagtagatgtctttcttcactgatttcactggtagttttcatctctttcttatgttcctcatatatgctttcttattcctacctaatggatttatgattttttgaatctcctaaaattttattaaaaatactatatgttggctgggtgcagtggctcatgcctgtaatcccagcactttgggaggccgaggcggttggatcacatggtcaggagttcaagaccagcctgggcaatatggtgaaaacccgtctctactaaaaatacaaaaattagctgggtgtggtggcgggcgcctgtaatcccagctactcaggaggctaagacaggagaattgcttgaacctggcaggtggaggttgcggtgagccgagatcactccattgcattccagcctgggcaacaagagcaaaactccatctcaaaaaaaaggaaggagaaggagaggaagaagaagaaaaatactacatgttatgtgtatgagagagaaagagagagactgattcactgaacttagaaggtccaaatcatccaaataattttctaagtttatccaggttttcttggatgcaaaatccttttccacctctatataattaccagaagaaacttacaaaaaaaaggaaatgctattgcctgaatttctcttgctcggaatcctgacatattcttgaagaaggggaaaaagacaccggatttgtcttatcgtttggagctttaaatataaatgactggatgttttctcaacatccttgtaggatggaaggtgaatacaggattattccatttttaagacaaaaactactagtcttgtgtacatacaaagctcccattacatggtataagtcttttgcttggtttcccttagtatgtgattcagtaaatgggttccttacaaagtgctgagatttcttataataccacttacttttaacctttcagtagttttctttgttgtatattttgtgttctttttcccaaattattatataagtttaagtgatgcttagaataatgtttaagaccactttaaaattgcataatttattgatgaaggattaaaatagaaacttgcttttcagtgtatatgcatttgaatcattgaaacacagtctgtgcatgcattacatattcacattaaaaaactaagcatttttgaaatagcagaaaagtttaagcaattacaaaaatgtgaaaatttccaactttaatcctgttaatatttagcaatattaggcgagaacatctgtaactattgctgaattaatattacttttataatacaaaaatttaaaataaacgtttttccaggaattttatcatcaaaataaaccccagaaaataatttcaaagtggataatctatccttatatatgtattaatacaattatatattttacatttacaaatatataggtataaaaattaaaaatgaatgtacttccaaacaagattgcacataaaaattacttcagaaaattgttaagatacacagaaaaaattgaagcatcataaaaaggaaattataatagtttacatatctagaaatagagtgcaaagttctaccaagaataagaataaattaatattaagcaatggtttgtgattttataatacacttacagaaattttattccactttatttacaactcagatatctaaaaaatagattgcttttgaaatacaaatgcaagaaacaattggagaaatctaaaatcataattagaagagagtagtgttttctttatcagccatctgatataatgttacacatcagtgggtgtagtaacggcttaggactctgagcgccgctgttgatcaactctaagcgaaaatcaggactccatccggatttccagttctgcggctacacaaaacccggcagataccacaaacctgctcccaggctgcagcaaaactcagcctctttcttctaaggaaaagatcaccatactttgcagggtggaagaaagaacctgatgaagcagcgcgcacagagatccttttgagaaaattccaaagcgaggcagcaatggcagctccaaccaaatgccagctccgcggaagattagtcctgctatgctcgctcctggggatgctatgggaggccagggccagtcagattcgctactcagtgcctgaagagacagaaaagggctatattgtgggcaacatctccaaggacctggctctggagccccgggagctggcggagcgccgagtccgcatcgtctctagaggtaggacgcagcttttctctctgaacccgcgcagcggcaccttggtcaccgcgggtaggatagaccgggaggagctctgtgctcagagcccgcggtgtctggtgaactttaaagtcctggttgaagacagagtgaaactgtacggaatagaaatagaagtaactgatattaacgacagcgccccaaagttccaggccgaaagtctggaagtaaaaattaacgaaatcgcggttcctggagcacgttatccacttccagaagctattgatccggatgttggcgtgaactccctccagagctaccagctcagccccaatcaccacttctccctgaacgtgcagactggagacaatggagccataaacccagagctggtgctggagcgcgccctggacagggaggaggcaactgcccaccacctggtcctcacggcctcggatggcggcgagccgcgtcgctccagcacagtgcgcatccatgtgacagtgttggatacaaatgataatgccccggtttttgctcaacggatttaccgagttaaagtccttgagaacgtgcccccaggcacctggctgcttactgcaacagccagcgacctggatgagggaatcaacggaaaagtggcatacaaattctggaaaattaatgaaaaacaatctctgctattccagcttaatgaaaatactggggaaatatcaacagcaaaaagtctagattatgaagaatgttcattttatgaaatggaaatacaagctgaagatggtgggggattgaaagggtggacaaaagtgctcatttcggtggaagatgtaaatgacaatagacctgaagtgaccattacatctctgtttagcccagtgagagaagacgcacctcagggaacagtaattcttcttttcaatgctcatgaccgagactccgggaagaatggtcaagttgtctgttctatccaggagaatctatcttttacattagaaaattcagaagaagattattacagattgttgacggcccaaattcttgaccgagaaaaagcctcagaatataatatcacggtgactgcaacagacagaggaactccgcccctgtccacagaaattcacatcaccctgcaagtgactgacatcaatgataatccacctgctttctctcaagcctcctactcagtctacctcccggaaaacaacgccagaggtacttccatcttctccgtgattgcctatgaccctgatagcaatgagaattctagagttatttactccttggcagaggataccatccaagggtctcctctctccacctatgtctctattaactcagacactggtgtgctgtatgctctgtgctcctttgactatgagcagtttagagatttgcaaatgcaggtgacggcaagtgacagtggaagcccaccacttagcagcaatgtgtcattgagactgtttgttttggaccagaatgacaatgccccagaaatcctgtaccctgccctccccactgatggttctactggtgtggagctggcaccccgctctgcagagcctggctacctggtgaccaaggtggtggcagtggacagagactcaggccagaatgcttggctctcctaccgcctattcaaggccagtgagccagggctcttctcggtggggctgcacacaggtgaagtgcgcacagctcgggccctgctagatagagatgcgctcaaacagagccttgtggtggctgtacaggaccatggccagccccctctctcggccactgtcacgctcacagtagccatagctgacagcatcccagacatcctggctgacctgggcagtcttcagatccctgcagacctggaggcctcagaccttaccctctacctcgttgtggctgtggcagtcgtctcctgtgtcttcctcaccttcgttatcacgctgctggccctcaggctgaggcactggcactcctcgcatctgctgcgggctaccagtgatgggttggctggtgtgcccacctcacactttgtgggtgtagatggggttcgagctttcctacagacctattctcaggagttctccctcaccgctgactcaaggaagagtcacctgatcttcccccagcccaactatgcagacacactcatcagccagcagagctgtgagaaaaatgagcctttgtgcgtctctgttgattccaagtttcctatagaagacacccctttggttccggtgagttcattttttttctttctttcttttctttttttgttttttgttttgttttgtttttgagacagagtcttactctgttacccaggctggaatgcagtggtgtgatctcggctcattgcaacctccgcctcccaaattcaagcgattctcctgcctcagcctcccaagtagagtagctgggactagagtagagtagctgggactacaggcctcccaagtagaataactgggactacaggcacgtgccaccacgcccggctaattttttgtgtgtttttagtagagacggggtgtcaccatgttggccaggctggtcttgaattcctaacctcaagtgatccacccacctcagcctcccaaagcactgggattacaggcgtgagccactgcgcctggcccttaactttctattatagttagctttctctttaactgtctgtacttaaggtagtataagttgatatcagtgtgtttctcatcacttttcactgggcctaattgttgctccaacactgaaaggaggcatttattagttatatttgctgatataactttcatgttctcataataattaacctgctgtcaacgtaaaccatacttcatggggtagctctcagcctgcattgatgtgggctttttgggtagggttgcttcattggttgcagtggactcatatcataaaattcttactcctttttttttttttttaagagatgggggtgtcattctgttgtccagggtggaatgcagtggtgtgggtaaagcttactgcagtctcaatctcctgggcttatgcaatcctcccacctcagccttcacagtagctaggactgaggtgggagggctagcaagctatgttgcccagactggtctcaaacgatcttcctgcttcagtttcccaaagcactgggtgaggtgtgaaccacctcacccagcaaattcttactcctacgatcatttattcaggtcatactatgtttgtaagggtaaactgataaaaaggtaaatgtattcttcttagagaaacagctgaaagcccagatttattgcttctattcttccatttctatgacaggaaaacacctctttgaggttatatttttcagatcacaagtgtgtaaagtctgtttgtgtttacagatattttctgacgaagattcaaacttcagttatccacttccaaaccctagtaaaccaattttttccctttaatggtgaaagttgtcacatcttttattctcatatcttcaaaggtcttaatttcctaatgctttaatgttaaattatggagaatagtaggacattcttcttttctatagtatatgcttgctcaagagaagtttctaagactggacactgtgaaatgacaaaacaaggaattaaaaatatttctctcacttatatattatttctggctcaattctccaacttttgagtctagaaatgaacttgcatatcagatataatttaagaaaatattctcaggaactgctgggaagattctaaaactattttactgtttttagctataaggaagagaataatgtattatttaatgttattttaaacatagtgttgtttcaaatagtaaataacatttcacaagacatttgaaaataagctttgaagttgactcaaaattctatgctaaacatgtgatccatagatacactgatgactgctggcatttctgtggaaatgaagaattgttttatttgtttgtaattatttgggtttcagttgctttatttttaagaaaaaaaagctgaagtgtctgggaatcctttatgacatacagacattttaattatttcaaacacgttttcccccttaagtgggtagcaaaaaaaataaagcatacttcaggctcatatttttaaccatgcaacaagaaaattgttacaatttctgttctgaggagtagccttcatacttagtatttataaatattgaaatgtatgttaatttggggaaaacataacagatatccatgaaggcttgtatgtcatggtaggtagttactattcgataccacaaaaatgtctcttgcccttaaaaccagaacacgaggctcaccagacagatgactgaatggagtatggaaaatctttatttctgtttttcttaggctatgtaggacttaacttattgtgcattggtaacagattgtagaacataagctgaaagataaaattcttgaccttaatgtctcatcttaaaaagaagcattggttgacattctatatctcgtattacttaaaaataatgggggagcgcagtatatattaaacaaagattggctttgtggtgatcattgttgaaggtggggtgatggctatgtgaaggttcactatatatactccctactgttgtataagtttgaaattgtgcataatagatttatttaaaacacaaagcatagaaatatctactataatattatggtgagagcaaaatttgagggggatgtacacctgcattttcgaagaatatatacatttcggagaccgaattcaaaatgaaaaaccgggctgctgtcccgcacggagcctctgggcgccgctgtcggccagtgcagagcaagcgctgacgccggggatccgtcagcctctggcctgggattccctgcgcagccaacaacagaaagaagaaaaccagctcccacacagagcctcccggctgcgcagacctttcccagcacagcggattgccagctccgagacccgggactcctcctgtcctgggccgaatgctcttttagcgcggtagagtgcactttctccaactggaaaagcggggacccagcgagaacccgagcgaacgatgggagggagctgcgcgcagaggcgccgggccggcccgcggcaggtgctatttcctttgctgctgcctttgttctaccccaccctgagtgagccgatccgctactcgattccggaggagctggccaagggctcggtggtggggaacctcgctaaggatctagggctcagtgtcctggatgtgtcggctcgcaagctgcgagtgagcgcggagaagctgcacttcagcgtagacgcggagagcggggacttacttgtgaagaaccgaatagaccgtgagcaaatatgcaaagagagaagaagatgtgagttgcaattggaagctgtggtggaaaatcctttaaatatttttcatgtcattgtggtgattgaggatgttaatgaccacgcccctcaatttgataaaaaggaaatacatttagaaattttcgaatctgcatccgctggtacacgactatcgcttgaccctgccacggatcctgatataaacataaactcaattaaagattataagataaactctaatccttatttttcattaatggttagagttaattccgatggtggcaaatacccagagttatctctggagaaactcctagaccgggaagaacagagatctcatagcttgatattgactgccttggacggaggggacccaccaagaagtgccaccgctcacatagaaatttctgtcaaggataccaatgataaccccccggttttcagcagagacgaatatagaattagtcttagtgaaaatctgccccctgggtcccctgtgttgcaagtgacagccactgaccaggatgagggggtcaatgctgagataaactactacttccgaagcactgcccagagcacaaaacatatgttctcattggatgagaaaacaggtatgattaagaataaccagtcatttgattttgaagatgtagaaaggtacaccatggaagtggaagcgaaggacggaggtggtctctctacccagtgtaaagtaatcatagaaatccttgatgaaaacgacaacagcccagaaataatcatcacttctctctctgatcagattttggagaattcacctccaggaatggttgttgccctcttcaaaacacgggatctggatttcggaggaaatggagaagtcaggtgtaatatagaaacagacattccattcaagatttattcttcttccaataactactacaaactggtgacagatggagccctggaccgagagcagacaccagaatacaatgtcaccatcgtagccactgacaggggcaagccgcctctttcttccagtagaagcatcaccttgtatgtcgctgacatcaacgacaacgccccagttttcgaccagacgtcctacgtggtccacgtggccgagaacaacccgccaggagcctccattgcgcaagtgagcgcctctgacccggatttggggctcaatggccacatctcctactctatagtggcgagtgacctagagcccctggcggtgtcgtcatacgtgtcagtgagcgcgcagagcggggtggtgttcgcgcagcgcgcctttgatcacgagcagctgcgcgccttcgcgctcacgctgcaggcccgcgaccacggctcgcccacgctcagcgccaacgtgagcctgcgcgtgttggtgggagaccgcaatgacaacgcaccgcgggtgctgtacccagctctgggtcctgacggctccgcgttcttcgatatggtacctcgctctgcagagcccggctacctagtgactaaggtggtagcggtggacgccgactcgggacacaacgcctggctgtcctaccacgtgctgcaggccagtgagcccggactcttcagcctggggctgcgcactggggaggtgcgcacggctcgagccttaggcgacagggacgcagcccgccagcgcctgctggtcgctgtgcgtgacggtggacagccgccactctctgccaccgccacgcttcatctggtcttcgcagacaacttgcaagagatactgccagacctcagcgaccgccctgtactctctgacccccaggctgaactgcagttttacctggtggtggccttggccttaatctcagtgctcttcctcctcgccgtgattctggccattgccttgcgcctgcgacgctctctcagccctgctacttgggactgcttccatcctggtctctgtgtcaagtctggacctgtagttccccccaactacagtgaggggactttgccttattcttataatctgtgcattgcacatacgggtacaaaagagtttaatttcctaaaatgcagtgtgcccctacattccaatgaagacatggtttgcagtgtttctcctggagccttaattccacctcatggtggggaggatttgacttcacatcctgagactctgacttcggtgagtttctcttttttgtgtgtgatttatctaatagtctactagtttctcatattttaggcatactactttattttcatatctagaatcatatgtttaaaatccatagctttttacaatattttctcaatgttttttcaattatagttttcactatgtatttggttcataagttgctctatctttttgtaaaataatgtcaccagactgaagatattttgtctttgtcttttttttttttttttttttttgagatggagtctcgcactgttgcctaggctggagtgcagtggcgtgatctctgctcactgcaacctccgccttctgggttcaagcgattctcctgcctcagcctcccaagtagctgggattactggtgcccctcaccacagctaaattttttgtatttttagtagacatggggtttcactatgtcgaccaggctgttcagaaactcctgtcctcgtgatcctcccaccttggcctctcaaagtgctgggattacaggcgtgagccacaatattttgtcaagttctgactatcgaacagaagcagtggtcttggcatctaagaaaacaaacaagtaacctatctattcaaatttgcgaagacttagtgaatttacgatatcttatttatatatttttaaagcctaaaaatattcagaagacaggcccagtggctcacacctataatcacagcactttgataggctgaatcggaaagtatcacttgagcccaagaattgagaccagcctgggcaatatagggagaccccccatctctactaaaacaacaacaacaaaaaaaaacattagcagagtgtggtagcattcccctgtggtcccagctacttgggaggctgagctgggtggattgcttggtcctgggaggtcaaggttgcagtgagccctgatcttgccactgcactccagcctgggcgacagagtgcgaccctgtctctaaaataaataaataaatatgcaggcagggccaagtgtgctgtaatcccagcactttgggaggtggaggtggagaatctcttgagcgcaggaatttgagaccagcctgggcaacacagggagactccatcgctacagaacatttaaaaattagcagggtgtggtggcacatgcctgtggtctcagctactctggtggctgtggtgggagaatcgcttgagcccaggaagtctaggctgcagtgagctgtctaggtgacagagtgagaccctgtctcaaaaaaaaaagacatttctaagaaataaatgaaatactattgcctttgcactcagtctctgtctctgattctctgatagaagatttttgaagaaaaaagataaaatctttgaagagttctatacttggaaggcatagtgacataaacacttctgaacatcctgttctctgtgtgaaagaagtgaacttctataccctttgcatttgagggaacaattgctactgggttgatgggcacacacagttgaagatatgtgaaccactggactttggcctctgatacaaactgcctaagagaagagattatttatactggtattaatgctctgatgaaaacaggtcatttgacataaacacttacttgttaaaaacctatatcactacatctaactttgttttctaaaacttttagtacttcaaattctacgtatttcttttctcattacaatgcaaacagtttaatttgcaactgtaatatatgttcattttagtttgtgattacctgcttaatcatttaaataggtccatttaacttgtatccctgtaagataaagtatgttttacacaaaaaggttaattaaggctcagtaaaactattctagaagagtactttaaaaacctcttacacaatcctaagctaaataagtttaatgaattaagtagttacaattataaagcttcagagtgaattatctcatgagtttatttaatataatctttgtatgaatgtatactaaataaaattggcctattcaaatcacaattttaaattataagacttttctgaatttacctagacactaatatgacctaaaataagtattatttaccttttattaaagtgtgtacatttctgttgggaaaacgtgttgcaaatatatatttaaccaaacattatcttgaaatatttacaatattttcactccactttatcacacctcccctaagaaacctacatatagtaaattatttaaagataggagtggagaaaccaaagaatctatgtaaaatataataatccaacagaatagtttactttccattgcatgtatcacttgggtgcagtaacttcttaggactctgagcgccgctgttcacctactaggagagaaaacgcagccagagctcaatccggattctcagggcttcaactacacaagccccacaaaccggctgctgggctgcagggaagctcactccagaatttaaagtgcccaggctacagagacaccctgaagccacagaaagacaaaggaaccggttgaaacacacaacgtgtccagtgaggactttgcagaattctgtaaccagactacaatggccgctcaaaggaatcgctcaaaggaatcaaaggattgcagcgggctggtcctgctctgccttttcttcgggattccatgggaggctggagcccggcagatctcctactcaattcctgaggaattagagaaaggctctttcgtgggcaacatctccaaggacttgggtctggcgccccgggagctggcggagcgcggagtccgcatagtctccagaggtaggacgcagcttttctctctgaacccgcgcagcggcagcttgatcaccgcgggcaggatagaccgggaggagctctgcgctcagagcgcgcggtgcgtggtgagttttaatatccttgtggaagacagggtgaaactttttgggatagaaatagaagtaactgatatcaatgacaatgctccaaaattccaagcagaaaatctagacgtaaaaattaatgaaaatgtcgctgcgggaatgcgttttcctctcccggaagctattgatccggatgtgggcgtgaactccctgcagagctatcagctcagccccaataagcacttctccctaagagttcagagccgtgccaatggcgtcaagtacccggagctggtactggagcactccctagatcgcgaggaagaggccattcaccacctggtcctcaccgcctccgacgggggtgaccctctccgatctggcactgtccttgtcagtgtgactgtcttcgatgcaaatgacaacgcgccggtcttcaccttgccagaataccgagtgagtgttcctgagaatttgcctgtgggcactcagctgctgacagtcacagccaccgacagggacgaaggtgccaatggagaagtgacatattcattccgaaaattacctgacacgcaattgttgaagttccaactaaacaaatatactggagaaataaaaatatcagaaaatctagattatgaagaaaccggtttctatgaaatagaaatacaagcagaagatggaggagcatatcttgcaactgcaaaagtgttgattacagtagaagatgtaaatgacaacagtccagagctgaccatcacgtctctatttagtccagtgactgaagattcacctctgggaacagtcgtagcccttttaaatgtgcatgatttagactctgagcagaatggacaggtaacctgttccattttggcgtatctaccatttaaattagaaaagtccattgacagttattacagattggtgatacacagagcccttgacagggaacaggtatcctcttacaatatcacagtgacagccacagatgggggaagtcctcctctatcaacggaagctcactttatgctacaagtggcagatatcaatgacaacccacctaccttctctcaagtctcctactttacctatatcccagagaacaacgccaggggtgcctccatcttctcagtgacagcgctggacccggacagcaaagagaatgcccagattatttactccctggctgaagacaccatccagggggtacctctgtcctcatacatatccatcaactcagacactggcgtcctgtatgcactcagatccttcgactatgagcagtttcatgagctacagatgcaggtgacagccagcgacagcggggatcctccactcagcagcaacgtgtcgttgagcctgtttgtgctggaccagaacgacaatgcgcccgagatcctgtaccccgccctccccacagacggttccacaggcgtggagctggcgccccgctccgcagagcccggctacctggtgaccaaggtggtggcggtggacagagactccggccagaacgcctggctgtcctaccgtctgctcaaggccagcgagccgggactcttcgcggtgggggagcacacgggcgaggtgcgcacggcgcgagccctgctggacagagacgcgctcaagcaaagcctcgtagtggccgtccaggaccacggccagccccctctctccgccactgtcacgctcaccgtggccgtggccgacagcatcccccaagtcctggcggacctcggcagcttcgagtctccagctaactctgaaacctcagacctcactctgtacctggtggtagcggtggccgcggtctcctgcgtcttcctggccttcgtcatcgtgctgctggcgcacaggctgcggcgctggcacaagtcacgcctgctgcaggcttcaggaggcggcttgacaggtgtgtccggctcgcactttgtgggcgtggacggggttcgggctttcctgcagacctattcccacgaggtctctctcaccgcggactcgcgaaagagtcacctgatcttcccccagcccaattatgcggacacgctcatcagccaggagagctgtgagaaaaacgatcctttgtctttgttagatgattcgaagtttcctatagaggataccccattggttccagtgagttttattttcatttttacttttgttaaaaaaaaaaagattggtttttactttgaagtttgcggcatgatggtggaaagtgtaaatgctaaaacactgatgagtagaatttgatgtttattaaggttttttttttttttttttttttttttttttttactttctggtaaaattcacctagtctcaatcaaggcctatatatcataaggctttgttatgattagctttgcagaaccttgtagtttatagtgttgttgagtacaatattgacaattcctaagacagacttccatacagaagtgcctgtcaatttatatttcctcctgggtggtcacatattgaaactccagccccttaagcaaccctcttgttctgaaggcaggtctggtaagaataggtaagtatcagaaagaaatcacctctggaaacacaacccaaatccaagaatactcaatgcagttcttcccaaggagaagggcaataggcctttttcaaactacattttatatatttttcaatctatactttgtggtgatagttgcagttgaatatactaagtttttcattaatattgaattaacaatttatttataacaatgtatgcttagatttttccagccctatttataactgataacactgcagtatcctttttgcatacaattctctaatttcacactgctatgtggaagatatagcattttaatttaactttcattgctcaatagggatcctgaggaggctatagagggtgaaattaagaatatttgggattctgcttttgtcttttttgttaaattttctagtgactaaggctgaaagtaaatatgggttgggaagacagataaatttgtacatgttcccgagaacaggagcaagagatatatgacaaagctatttcagtggctctttaatgtataaggaggcaaacacctgaaactctgaaaactctgaaattgagaggcaaaataaacttagagtcaagaaagaaatgccatttctgcagatcagaatataaacaccaaccacagctgtaaaaaagaaaagaatatatgcaacgaagggaaattatataaacaaaggatcattggaggtactgatgagttcatttagttcaatgaaaatagtgacgtattaggtagatctcttaattttattactagtattctactaaatgtggtagtataaagtcaaaaagcattccgaagtttctcaagacccttataattccatgatttttttcaggtcagtcaacatttgttgaatgataggtctgtggaaggaaagcacactctttagggtcatagttattaactattaaaccattgaaactattattttatatttgtgttaatgagagtcaaaattattgtgcattcatctcaaataattctattattttgaaaaatacaggttttttttttaaaaaaaactgctcttgacattgtagctattgtgagaaaatattttgattataattatttaaaagcaatacaggacaccctggatgatggtaatgactagggcaatggttgcattccagtacttaagtatgaaataaggaattattactttctgggtgaatataggctagaattgaagacaaaaaaatttgttgcttatcttcagtacttccagcttcatagataattactcttaaaaggaacaagaatgactgcctctggatggaggaattggatagcaatgggccgtgggataggagacctataaaccttcatgctatattattttgtgcctttttaaattttgaagaaaaaatattcatttattcaagatatatgtaaattcagtaaataaaaagatatgatagttatgaccaagtggaaatatatttcctgatgtaaaaggaatcactgaggaaaaagattaaaatattttggctgtcaactcgtagtttaaaaaaaattccttgaaagaggtagagaaaagtcaagttgcagtcccacacagagcctctgggcgccgccgtcggccagtgcagagcaagcgctgacgccggggatccctcagcctctagcctgggattccctgcgcagccaacaacagaaaagaaaaccagctcccacacagaggctcccggctgcgcagaccttgcccagcacaccagattgccagctccgagacccgggactcctcctgtcctgggccgaatgctcttttagcgcggtagagtgcactttctccaactggaaaagcggggacccagcgagaacccgagcgaacgatgggagggagctgcgcgcagaggcgccgggccggcccgcggcaggtactatttcctttgctgctgcctttgttctaccccacgctgtgtgagccgatccgctactcgattccggaggagctggccaagggctcggtggtggggaacctcgctaaggatctagggcttagtgtcctggatgtgtcggctcgcgagctgcgagtgagcgcggagaagctgcacttcagcgtagacgcgcagagcggggacttacttgtgaaggaccgaatagaccgtgagcaaatatgcaaagagagaagaagatgtgagttgcaattggaagctgtggtggaaaatcctttaaatatttttcatgtcattgtggtgattgaggatgttaatgaccacgcccctcaattccggaaagatgaaataaacttagaaatcagtgaatccgtcagcctggggatgggaacaattcttgagtctgcagaagatcctgatattagtatgaattcgctgagcaaataccaactaagtcctaacgagtatttctcattggtggagaaagacaatcctgatggtggcaaatatccagaattagtattgcagaagactctggaccgagaaacgcagagcgctcaccacttggtactgaccgccttagatggtggggaccctccccgaagcggtactgctcagataagaatcctggtaatagatgccaatgacaaccccccagtgttcagccaggacgtgtacagggttagccttcgggaagacgtgcctccaggcacctccatcctgagagtgaaggccactgaccaggacgagggcatcaactcagagatcacttattccttctttggtgtggctgacaaagctcagcacgtgttctctctggattacactacaggaaacattctaactcagcagcctttggattttgaagaagtagaaagatatacgataaacatagaagcaaaagaccgaggatctctctcaacacggtgtaaagtaattgtagaagttgtagacgaaaacgacaacagcccagaaataatcatcacgtcactctctgatcagattatggaggattcccctccaggagtggttgttgccctcttcaaaacacgggaccaagactcaggggaaaatggggaagtcaggtgtagcttaagtagaggtgttccatttaagattcattcttcttctaataattactacaagctagtaacagatgaggccctggatcgggagcagaccccagagtacaacgtcaccatcgcagccacagacaggggcaagcctccgttatcctccagcaaaaccataaccctgcacattactgacgtcaatgacaacgcgccggttttcggacagtcagcctacctggtccacgtgccagaaaacaaccagccgggtgcctccatagcgcaagtcagtgcctctgacccagacttcgggctcaacggccgtgtctcctactctctcattgccagcgacctggagtcacgaacgctgtcgtcctacgtgtccgtgagcgcgcagagcggggtggtgttcgcgcagcgcgccttcgaccacgagcagctgcgcaccttcgagctcacgctgcaggcccgcgaccagggctcgcccgcgctcagcgccaatgtgagcctgcgcgtgttggtgggcgaccgtaacgacaacgcaccgcgggtgctgtaccctgcgctgggtcccgacggctccgcgctcttcgacacagtgccgcgggccgcgcagccaggctacctggtgaccaaggtggtggccgtggacgcggactcggggcacaatgcctggctgtcctaccacgtggtgcaggccagtgagcccgggctcttcagcctggggctgcgaacaggcgaggtgcgcatggtgcgtgctttgggtgacaaggactcggtccgccagcgcctgctagtcgctgtaagagatggaggacagccacccctttcagccactgccacgctgcacctggtgttcgcagatagcttgcaagaggtactgccggatttcagcgaccatcccacaccctctgactcccaggctgagatgcagttttacctggtggtggccttggccttgatttctgtgctctttctcctcgcggtgattctagctattgctctacgcctgcgacagtctttcagccctactgcaggagactgctttgagtcagttctctgctccaagtccggacctgtgggtccccccaactacagtgagggaacgttgccctatgcctataatttttgtgtgcctggggatcaaatgaatccagaatttaattttttcacatctgttgatcattgtccagccacacaagataacctcaacaaagatagcatgctactggctagcattttaactcccagcgttgaagcagataagaagattcttaaacaggtaagtatttaaaaatgtatttaatcctttttatattacaatatgccaatatattccaatatagtggtattattttaagattctagataacttcttcatagagttcgcaaaatataggtcaaatttatggttatcattattaaaacaaaagtttaaattaaatgcctcagtcttcctactattcaaagacattttaaagcaaactacatgggtaatctccggtgacatttttatgaagtaaaatacctttcggttaaaaatataaaatacaggtatatttttacggcatggtattttaattgaaaccctgatgctactcaatttttctcaagtatttcatcttcatttactcaataaaggaaccttgtaagaattatagttaggcatcctacctgatgattttatcgggaccgtattatttccacttccagaaatgtcgttcctttcagtcggttaaaatcaattggaaccaactacaacctacaagttttcagctccagtaatattttgaaaactttttaaaaattaagcaagcccttttaataattactcctttcgcaggtgttcttggtaaagttttaacgtcacataatgtaagtattgtgtatcatcgtttttaagctctacaaatacgtgtgattcacaaaggtgagcgtaatcatttcttctggaatttcttagtcgttgcaataataagaatgggctctaggcgccgctgctcaccaatcagggaatgggaagctgcgcgccattgagtccctccctcccccgcctctaccacacaaagcggaatgagatggatactcacagatcctgacactggagacttagaagtattttccttcgctttctgatatattttggatgtagtcggcctaggacttcatagatacataagccgattcacaaccaaccagctcgagaaaccgcggaatatcggcttagagcctgccatggcgaatcggctacagcgcggggaccgcagtcggctgctgctgctgctgtgcattttcctggggacgctgcgggggttccgggccaggcagatccgatattcggtgccagaagagaccgaaaagggctccttcgtgggcaatatctccaaggacctggggctggagccccgggagctggcgaagcgcggagtccgcatcgtctccagagggaagacacagcttttcgctgtgaatccgcgaagcggcagcttgatcacggcaggcaggatagaccgggaggagctctgtgagacggtgtcctcctgttttttaaatatggaacttctcgtggaagacaccttgaagatttacggagtggaggtggaaataatagatattaatgataacgcccccagcttccaggaggacgaagtggagataaaagtcagtgagcacgcaattcctggggcgcgatttgctcttcctaatgctagggatccagatgtgggcgtgaactccctccagagctaccagctcagccctaataattacttttccttgcaactgcggggcagaacggatggggccaagaatccagagctagtactggagggaagcctggaccgagagaaagaggctgctcacctgctcctcctcacagctttagatggaggcgatcccatccgaaagggcgcagttcccattcgtgtggtggtcctcgatgtaaatgatcacatcccaatgtttacacagtccgtatatcgcgtgagtgttccagaaaacatcagctccggaactcgggtgctgatggttaatgcaacggatccagacgagggaatcaacggggaagtaatgtattcatttcggaacatggaaagcaaggcttctgaaatattccaattggattcacaaactggagaagttcaagtacgggggtctctggattttgaaaaatatagattctatgagatggaaattcaaggccaagatggtggaggtctctttaccaccacgacgatgttgatcactgttgtggatgtgaatgataacgctccagaaataactatcacctcttctattaattcaattctggaaaactctcctccaggtacagtgattgctcttctaaatgtgcaagatcaagattctggagaaaatggtcaagtctcctgttttattcctaaccacctgccttttaaattagaaaagacttatggaaattattacaaattgataacaagcagagtgctggacagggagttggtccagagctacaatataacgttgacagccacagaccagggaagcccgcctttgtctgcagaaactcatgtctggctgaatgtggcagatgacaacgataaccctcccgtttttcctcactcctcttactctgcctacattcccgaaaacaaccccaggggtgcctccatcttctcagtgaccgccctcgacccggacagcaaacagaatgccctggtcacttactctctgacggatgacactgtccagggggtgcctctgtcctcctatgtctctattaactccaacactggtgttctctatgccctacaatccttcgactatgagcagtttcgagacttagaactgagagtgatagcacgtgacagcggggacccgcccctcagcagcaacgtgtcgctgagcctgttcgtgctggaccagaacgacaatgcgcccgagatcctgtaccctgccctccccacagacggctccactggcgtggagctggcgccccgctctgcggaacctggctacctggtgaccaaggtggttgcggtggacaaagattcaggccagaacgcctggctgtcctatcgcctgcttaaggccagcgagccgggactcttcgcggtgggggagcacacgggcgaggtgcgtacagcgcgggcactgctggacagagacgcgctcaagcagagcctcgtggtggccgtccaggaccacggccagccccctctctcggccaccgtcacgctcaccgtggctgtggccgacagcatccccgaagtcctggcggacctcggcagcctcgagtctctggctaactctgaaacctcagacctctcgctgtacttggtggtggcggtggccgcagtctcctgcatcttcctggtctttgtcatcgtgctgctggcactcaggctgtggcgctggcataagtcacgcctgctgcaggcttctgaaggcgggttggcaggtatgcccacgtcacattttgtaggcgtggacggggtacaggctttcctgcaaacctattcccacgaggtctctctcattgcggactcgcagaagagtcacctgattttcccccagcccaactatggggacacgctcatcagccaggagagctgtgagaaaagcgagccactcttgatagctgaagactcagctatcattttaggcaaatgtgacccgacaagtaatcaggtgagatttatttctctgcctcctaattgttggtgtcttggcacaagtcttttaaggagatgttttttgagcctgttatgaaaactgtttggggggggggtggggcggcatatatttagttcatatatatttagagcaatacatgtgagttttactttgcctttcatgagattacgataatctttcagaacgtttttgtgaaagtcatttttcaatcttggcatattttcttttgatttcaaaggggccattcaactatgctggtttggtttgaagtaagttgaattttagtattatttttctattatcagtgtatgaggctctcaatttattatatatagatacaaattaatgattcacaaacactttttatttccatttcaattttgctgtgccttcactgatttgtagttatattccaccattatttgctattactgctaatgttcaaattttgatcctgttgatttaatagcatgctccctctagctctccttctcatctatctatctatacacatgcacacacacttatacacgtaagcttttctctgagcaattttattttgattcttggtggctggtaatatgcttagatcctgttgactatttcaactttgtctcatttcttcatcctatcaacacagacatattgactggcttttaactactggatttccttgggagataaaatttagatcacattttttcttaagctctagatgtcttttccattactatggtgaagttacattgactgttctgaggaaataattgaattattgaactggtattatttccttttattcttttactttggtgtctgtgtttgtatgtatggaaggttttttaatgtagtaaatccatatatagaaataacttgattttgattcagtgcttctcaaaaacctattttcaaatgtgctaaagatgtctacagatttattcaaatagagtagtttgtgaatatataaatagattgaaggtatttggactttaattaaactgatttagctagtatccttctggctatttttttgttcattttcagtgtagttgggagtcatagattccttctttctttctttataaggtcattcttatggcaaatagtacattcagttcttttattcagaccaacttgttattgaagcttgatagttgcctgacatacatgttatctgaagcaatgtctaggaaagccaaatgaggaaaggagacttatctagggtttttgatcacaggaatcatttccataatcaattcagtcaacactctcacatcacttctaggtatttgccccaaattacttggatatttatgttccctttcaagtttagttttctcatttaggaatttaccttatgtcattagttgtaaactgactatctagggctcggacaaaaataatttcaactgtaggaaaggcaagtcttccaacagatgcctacatttttcttgaagtcaagaaaaatgttcaggtattttgagcatctagggataggatttatacttgtggaattccaaactgagaaaaatgatgtaaggcattgtactttgactggaattagttaaataaaaaggatatgaggtatttggctgggaaaaggagattgttccatattataaaacctcatctaaactaacttcccaagatcgtggagaacaaaaaggaagggttggctttgaaatgtgatattaagagggttatgttgattcggaggtagtgataaagttctgttaaggtataacatatagtcccattaaatagaggataaaaataaaacaccatcacatttcatgttattaattcctatggcaacctactaggctatacctttatattctctttatgatgaaacatgaaacaataatccttttcagaaacctcttttataagtgataagaagggtttggctaactttattctgaatatgccctatatagctttcagtgctcctccagttttctctgataaaactaggaggaaaattatctgcacatcagattgaaaataatactgcatatcatttcatagtggtcaaaattttcccataccacttgatggggatgttttcccacaaggtttttgttctacaacaggagagaagactttgcctagttcttccaatatgtgcattgcttctgcttagaaaaaaacaaacttttaaattctctttgctgggttaatgactgttctatagattcccatctctaaggaatcttctttggtagtaaacactggaaaacagtcactacgaaaactcataaaatgtctagtttcctatacattagtccaacacatcagtctaattctgaatcccattgaattagcaaaggcttccggctgcagttttctaaatagactcagagccctgctgttggccaatgtgctgcaagaactggagcctgggatctaccaggacgatattctgttcagtcacagaagcaagtcggagagtggccaagacttgggctttctgctcctgcaaatctgattccatacggattggggtgccctcaaactgggagcattgagttttctatgtatggaagtaaatattttaaaagcactttgtgaaacattttctcttaacgtcggagactgcagcaacgcatgggaaggatgggaaacagggtgaagcagagaagcaggacccggcagtggcaagcactcttccctttcctgctgcctttgttctgcggggcaccctcggagcagatccgctactctattccagaagaaacggtccagggctccgtggtggggaaccttgcggaggacatgcggctgcatgttcaggatttattgacctgaaaccttagagttagtgcagagaaacaatactttaccgtgaacacggagaatgggaacatacttgtgagtgacagaatagatcgagagtcactgtcttcaaaatcctctgtgtcatacccttagagattgtagcagagaatcctctaaatgtttttcacataaatgtgatgatagaagatataaatgataacccacctcattttccccaaaatagcattgttttacaaatcaatgaactagcaattccaggcattcggtttggcctggaatctgctatagatgcagatgtagggcctcactctctccagagttaccagctcagttctaatgaacatttctctctgatgatggacaagactaaaggcaagaacgctccagaattagtgctggagaagcccctgggccaggagcaacagagctctcatctcctggtcctggaagcaatggacatgggtgacccagtcccaactggcactgctgcaattcaaattgaggtcactgatgccaacgataatgccccagtttttagccaggatgtatacaaagtcagccttagagagaatgtgcccccaggcacctctgtactaaaggtgacagccactgaccaggatgagggtgtcaatgcggagatcacctactctttcaaatccctacgagatgatattggaaatatgtttgtgctagaccatcaaaatggggaaattaaatccaaagacttaatagacttcgaatttcgtagcagttataccatgagagtagaagctaaggatggtggaggcatgaccagcgaatgtaaaattatactagaaatcctagatgagaatgacaatgccccagacgtggtttttacttcagtgtccagttctgtaactgaggacgcagaaccctggacggtgatcactctgttcaaaacacatgataaagattcgagagaaaatggggaggttacatgcctcataaacgaaagagttccttttagaatcgaatcttccgccaataatgactataagcttgtaacagatgggaccctggattgggagcggatcccggagtacaacgtcaccatcactgccactgacaagggcaagcctccgctctcatccagcacaagcctcaccctacgcattggtgaagtcaacgacaatgctccggttttccaccaagtctcctacgtggtccacgtggccgaaaacaaccttcccggagcctccatcccacaagtcagcgcctctgacctggacctagggctgaatggccaagtctcctactccatcgttaccactgacttggagctgcgggcactgtcgtcctacgtgtccgtgagcgcacagagcggggtggtggtcgcgcagcgtgccttcgaccacgagcagctgtgcgccttcgagctcacgatgcaggcccacgaccagggctcgcccgcgctcagcgccaacatgagccggcgcatgttggtgggcgacctcaatgacaatgtgccgcgggtgctgtaccccgcgctggggcccgatggctccgcactcttcgatatagtgccacgcgccgcagagtccggctacctggtgaccaaggtggtggcggtggacgcagattcgggacacaacgcttggctgtcctaccacgtgctgcaggccatcgagcccgggcttttcagcctggggctgcacacgggaacctgctggttgctgtgcgtgacggaggacagccgccgctctctgcgccgctacgcttcacctagtcttcgcagacagcctgcaggaggcactgccagacttcagtgacagtcctgtgccctctgattcccaagcaaagctgcagatttacctggtcgtggccttggccttgatttctatgctcttcttcctcgcagtgattttggcggtcgccttgcacctgcgatgctcttccagcccctctgcctggggttgctttcaccctggtctctgttctaagactagaccaggggtttttcccaactacaatgagggaactttgctttattcctgcaatctgtatgttccctcggattctagaaaaagaagatttaattttctcaccatgacaccagaaacagtccccccacaagatctttctaatgaagtttctctggtagcaagcttcactgaagagaataacaagataagctctaactctgttgctcctactcacgtgagttccaatgaatgtctttcatttacaaatggatgaggtttaattttcaaaccaatattttggcaagaaaatcttaaacatattatatctactattgcttcaggtttgtttgcccactcttaatatttcctgttcctttctgtgtgggccagtaacttcattattagctttcatgtatttttgaaacattttcaccatttttacgggagactttttttttttttggacggagtctcgctctgtggtccaggctggagtgcagtggcatgatctcggctcactgcaagctctgccttccgggttctggccattctcccgcctcagcctcccgggtagctgggactacaggcgcccgccaccacgcccggctaattttttgcatttttagtacagacggggtttcaccgtgttagccaggatggtctcgatttcctgacctcgtgatctgcccgcctcggcctcccaaagtgctgggattataggcgtgagccactgcacccggcccggagacattgtttatacacacacacacacacacacacacacacacacacacgtgtgaaaagtgggtattatgatactgctgtcattgagatattttaattgaggaataaatttttttcctgtgatgtttcttgggacatcaatatttgagtatataaggctttttctttaatccattaactataaattttgaagaaaatgcatgagaaaatggagaaaatgtgttttttttttaaaaaaaattgagattaaggtctcattatgttgcccaggctggactcaaactcttgggctacagtaatcctcccacctcaatctccagagtagctgagactacagttgcctgaaactgtgcctggcagagaaaaaagcttaaaaaaataagaacatggtaatgatttgataatattcagttacatttacttttgattcttgtaattcaagtaaactcaattttatgtctgatattttctcacagctacctatatatttcttcccaatttaaaatatattattttattttatgcctagcaaatatctttacagtataaatatttacgctcatgaaagtacgtagccagttatttcttagggagaattttttccctatattttgatgggcttccaaaagtattaccagtaattctcagtaattacaattaggtcagttacccaggaaaaggtaagtctgtaacattctttggactaccaattttcttttactaagtttcctgaacaataaatatttttgaaatataatgtattaatagaattctggagtacttccattatttccagtcaatgcaagttggaatgcttctactttatgctaaaaatattaatgtttctttttcacttgggttcttgttaagtgtgattctgataatgtatacaatcacatatcatttttaggtttccataatatcatgaaaatttgatttttaagcgttacatgtcaacaacctggtaaagtaatccttccattcaggatcattcaaggaatctatttaaaaatattttccccaaattatagctgaatcagaaagtttaaattattatattatatgatttgtcaaaaagagaaactcctagggagacatctccataataggtgtgttgggggaacagtaatctcaaagcagatgcactaacattataagattaaaatcattgtttatagaaacttccaattcatttaaaagctcattggggaaaaaaaagctcattgggaaaaaaaaaaaaagctcactaaagtttctattaaagcgaatacggtagatttccatccccttttgaagaacagtaggtggagctatttaagatataaaaacgaaatatcctttctgggagttcaagattgtgcagtaattggttaggactctgagcgccgctgttcaccaatcggggagagaaaagcggagatcctgctcgccttgcacgcgcctgaagcacaaagcagatagctaggaatgaaccatccctgggagtatgtggaaacaacggaggagctctgacttcccaactgtcccattctatgggcgaaggaactgctcctgacttcagtggttaagggcagaattgaaaataattctggaggaagataagaatgattcctgcgcgactgcaccgggactacaaagggcttgtcctgctgggaatcctcctggggactctgtgggagaccggatgcacccagatacgctattcagttccggaagagctggagaaaggctctagggtgggcgacatctccagggacctggggctggagccccgggagctcgcggagcgcggagtccgcatcatccccagaggtaggacgcagcttttcgccctgaatccgcgcagcggcagcttggtcacggcgggcaggatagaccgggaggagctctgtatgggggccatcaagtgtcaattaaatctagacattctgatggaggataaagtgaaaatatatggagtagaagtagaagtaagggacattaacgacaatgcgccttactttcgtgaaagtgaattagaaataaaaattagtgaaaatgcagccactgagatgcggttccctctaccccacgcctgggatccggatatcgggaagaactctctgcagagctacgagctcagcccgaacactcacttctccctcatcgtgcaaaatggagccgacggtagtaagtaccccgaattggtgctgaaacgcgccctggaccgcgaagaaaaggctgctcaccacctggtccttacggcctccgacgggggcgacccggtgcgcacaggcaccgcgcgcatccgcgtgatggttctggatgcgaacgacaacgcaccagcgtttgctcagcccgagtaccgcgcgagcgttccggagaatctggccttgggcacgcagctgcttgtagtcaacgctaccgaccctgacgaaggagtcaatgcggaagtgaggtattccttccggtatgtggacgacaaggcggcccaagttttcaaactagattgtaattcagggacaatatcaacaataggggagttggaccacgaggagtcaggattctaccagatggaagtgcaagcaatggataatgcaggatattctgcgcgagccaaagtcctgatcactgttctggacgtgaacgacaatgccccagaagtggtcctcacctctctcgccagctcggttcccgaaaactctcccagagggacattaattgcccttttaaatgtaaatgaccaagattctgaggaaaacggacaggtgatctgtttcatccaaggaaatctgccctttaaattagaaaaatcttacggaaattactatagtttagtcacagacatagtcttggatagggaacaggttcctagctacaacatcacagtgaccgccactgaccggggaaccccgcccctatccacggaaactcatatctcgctgaacgtggcagacaccaacgacaacccgccggtcttccctcaggcctcctattccgcttatatcccagagaacaatcccagaggagtttccctcgtctctgtgaccgcccacgaccccgactgtgaagagaacgcccagatcacttattccctggctgagaacaccatccaaggggcaagcctatcgtcctacgtgtccatcaactccgacactggggtactgtatgcgctgagctccttcgactacgagcagttccgagacttgcaagtgaaagtgatggcgcgggacaacgggcacccgcccctcagcagcaacgtgtcgttgagcctgttcgtgctggaccagaacgacaatgcgcccgagatcctgtaccccgccctccccacggacggttccactggcgtggagctggctccccgctccgcagagcccggctacctggtgaccaaggtggtggcggtggacagagactccggccagaacgcctggctgtcctaccgtctgctcaaggccagcgagccgggactcttctcggtgggtctgcacacgggcgaggtgcgcacggcgcgagccctgctggacagagacgcgctcaagcagagcctcgtagtggccgtccaggaccacggccagccccctctctccgccactgtcacgctcaccgtggccgtggccgacagcatcccccaagtcctggcggacctcggcagcctcgagtctccagctaactctgaaacctcagacctcactctgtacctggtggtagcggtggccgcggtctcctgcgtcttcctggccttcgtcatcttgctgctggcgctcaggctgcggcgctggcacaagtcacgcctgctgcaggcttcaggaggcggcttgacaggagcgccggcgtcgcactttgtgggcgtggacggggtgcaggctttcctgcagacctattcccacgaggtttccctcaccacggactcgcggaagagtcacctgatcttcccccagcccaactatgcagacatgctcgtcagccaggagagctttgaaaaaagcgagccccttttgctgtcaggtgattcggtattttctaaagacagtcatgggttaattgaggtgagtttatatcaaatcttctttcttttttttttttaattgctctgtctcccaagctggaatgcagcggtacgatcatagctcactgcagcctcaaactcctaggctcaagcaattatcccacctttgcctccggtgtaacagggactacaggtgcaagccacctactgtctgcctatctatctatctatctatctatctatctatctatctatctatctattactttcttgtacagacaggagtctcactatgttgagcaggctgatctgaaacttgggctcaggctagcctcctgcttctccctcccaaactgctgggattacaggcgtgaaccacagtgccccgcccttatcagatattcttttctggctgggcgcggtggctcacgcctgtaatcccagtactttgggaggccgaggcgggtggatcacctgaggttgggagtttgagaccagcctgaccaacatggagaaaccccgtctatactaaaaaaatacaaaattagccgggcgtggtggtgcatgtctgtaatcccagctacttgggaggctgagtcaggagaattgctttaacctgggaggtggaggttgcaatgagctgagattgtgccattgcactccagcctgggcaacaagagtgaaactctatctcaaaaaaaaaaaaaaaaaactttatcctctagtttcatccattgatgacacttgctttaatcacttattacaatcacctccaaatgaagattttataattccattgtttcttctacagttgttaattggctttctaccttgaagaagagttttatattctctatatatgtttgtttctatgattctggaagcatggttttctattttattcaatggcctgtaatctgttaatatcaattatttattttgatgctgaaattgtcccaggattggcctttgggactccctttaggctgatttctatgtcctttctgttacagcaagcttgggattatatccaagatttgtaattccaatgtacttacttctgtcagtgtaaacaaagtacgatttctggactagatgacttgggcattgtgggggaggtggaaattagaggtattctctgtttttcctgtaggatcttgcatttcttcctcttgctgcttgtctctttgtgtcgggaacaggccccccaaaatctggccataaactggccccaaaactggccataaacaaaatctctgcagcactgtgacatgttcatgatggccgtaatgcccatgctggaaggtagtgggtttaccggaatgagggcaaggaacacctggcccgcccagggcagaaaactgcttaaaggtgttcttaaaccacaaacaatagcatgagtgatctgtgccttaaggacatgcccctgctgcagataactacctcaatccatccctttatttccgcccatctcttcgtttcccataagggatacttttagttaatctaatatctatagaaatgatgctaatgactggcttgctgttaataaatatgtgggtaaatctctgttcagggctctcagctctgaaggctatgagacccctgattccccacttcacacttctaaaaaaaaaaaaatttttttttctgagcttggagaaatatatcccttagtacacttggcatttataaagcagacatcaataaatttatatatatgtgacagataccaacaacaatccagtccccttccctcataccttatttatgtacatatattttatataatagatataatttattaacaatttataaaattactttgttaatactctatatcattttctagctgaatttatcaatgataatgctcttttcccacttttatttttttcccattgaccatgcagcagttttgtgtagaccgtctgataacaactgatctgtttatctaggggggagaaatctaattcaatggaaaatataaataaaattgtgataaacttttgtaaatagagtggcttttaactacacttgagatggctagcaaattcataaagtgaatttactttctttcaaagttcagtaattctttctggccattagggatatgtccatttatactttctcagtatcccaagtcatttcatggttttaaatcattcatgaacttccaaatatagtgaatttatttcttctgcatttaaaattttatcacttaaatatacaatataccgtattgccatgacgaaaaatggtaaagactatttttcacttctgttatgcatttcattaatacgatatctgtatgtgtttccaagttagacatttcttttgcccatttcctacactaatgatactaatgatgactttgtggaatattcagaattaacaaaatgtgttttgagtgctttttttagtactggggcaaatttgcagtaatatcgcctgctttttacattaaattccccataacttttacaactatgggaaaatttctgaaacgtgcacagattccaagtgttttctgagaactttatgcttattgtagagtggttacagacactgaatgctaaagtgtattactctttgaaaagcattgcttgatttcttttggtgaattctgtaaaggtgcagggaaacataacgtcccaattattttttctttcttctttgtttgctgcctatctactttgaaagatacaatagttaaaacccagaaaagagattggaaaccccttagagaatgaaagacatccaagggctctaaaatgcggcagttgctgcttctgagaccaaaaaagggggcaaaatatagagtgtgtggttctacttgtgtgattttttgaaagaaagtatttgaatttatctaaaaatactaaatttgtatttacattagttttcaaatagaatttaataagtacagtgttctataggtaatattgagagaaatagaggacaatgaaacctctctcctccatcatcttgtatgaactaccaaaatgtttatcatatggacagttctcatatatagtcaaatagaaagaaagacataataggaaaacaaatgacttgggaaactaagctaacatggtctaattattctgacctctgctcacctaacttgatttaggaacaaatcattgagagttagagcatgaatagtcaagactgttagaccatatctcaaatatcagtgacttcaatcaactatgtttccagtttaagctgaataggctttattaaatagttgttgaatgaatggataaacaaataatgtactctggggattacctgataccaggattctgaattttcagatgtatcatagaaggatagcagctttgcaattaggtaaattgttaactgtgtcacctttagcaagttatttaatctctttgagcttcagcaaagtaggaataatcatatctaatttgaaaggtcgtggtgatggctagggctaacaaaaatctgattcacaacatgcaattaattaacagtagccatttttagtggttgaccaaaaaaaggatttatattttcaatgccagcacactcgatgttctgttgggaaaaataataatgatttttgtgtgcttctccatatggtataatggaatgatttgtggatggaaataaaactgttctaaaatttttgtgacagctggtttaaaaatcttaagtgcctaggcacattcttgattgagaagccacagttttaggccataaaagatgggggaaagatttttatatgagacaattttgtgagtgttactttttctttgtctgaaccatagtgaaatctaaacaaggatcttgtgaaacttattttaaagaagcagtttacttcaatgggatcttagataatttcaccagaaaatggatcaccgaaaccagaaggctggtgatcattatttggtttgggccatataagaattgaaactaacggcttagctttaggatttttaggacacttgttgataatttaggattcataattaacatatgtgttgattgttttctgagactaactgggcaatgggtttggatgtgtttacatttattctgattccagtcataaaattatgtcaaggactttccttgtctttttatgtgtatgacagatgtgtatgtatccatttcatctaacaagttaaagcgttcagctataatttaaaatttgtagcttcactgttttatagtacctaaaattggaatgtaatcagtcagaagacattcatccactgctttcattccagaagtattatgctttttgaagcagcaatagcataggaatgttgaggagactatactatacttttatagcatatttaatctcgtagatcacttttcaatgaattataaggctgatgacaaatgagcaaattgtatcagttttctttatgacatgtaacagagtatagctgtgatcatgaattggatagttctggtgtaaaaatctgctttatccccatataagatgtcaggttcagaaaagcaaacacatagtttcgaagagatgttgatcaaactgatgaggctaaatctcaagaaagagacacagttaccctctaatgttacactttgagttcacctttttttttttttttgagacagagtctcaatctgtcgccaagctggagtgcagtggcactatcttggctcactgcaacctctgcctcctgggttcatgctattctcctgccttagcctcccgagtagctgggactacaggcacacgccaccacacccagctaatttttgtatttttagtagagatggggtttcaccatattggccagaatggtcttgatctcttgatcttgggatgcacccaccccacctcagcctcccaaatagctgagattacaggtgtgagccaccatgcccgaccactttgagttcacttttaagaaaccatacttaatggaaaattaccagtaacagggcatactgtttaggatgcattcctaaaatattaatggcaaaagatagccagcctatggcaaagctaattggaaaaaatattttataaaggatgagacttctggataccatatgggaagggctctggttcaggaaaatgtttttaaaaaactgtcattgaagagaccatagaatcaaacaaaataatttaatctgtatgtaaaagaagttggtaccaccataatttttcttatacatgtcatataaggatctactctgtgtattgtcattgagggcagatataatttcttagttcatcattaactctctgaagtatttcacacagtagtttgtacaccttctaagtactcaatacaatgcttgagttcaattattggaaagtggtctcttggagaaaaaagaatcatagtgcaaaaccaattattttacatggacttttcctctatatctaagccctaataagaggcagctgtctgatatacatacatacatacatacatatatatatatatatatatatatatatatatatatatatatatacacacacacacacacatatatgtatatatatatttggagtaggggatggagtcttgctctgtcacccaggctggagtgcaagtggtgtgatctcagctcactgcaacctctgcctcctgggttcaagcgattctcctgcctcagcctctccagtagctgggattacaggcgcctgtcaccatgcccagctaattttttaaaatatttttagtagagacagagtttcatcaagttggccaggctgctcttgaactcctgacctcaggtgatccacctgccttggcctcccaaagtgctgggattataggcatgagccaccgcaccctgccaactgtctgacttatcttaaaaggctaaggacctggtttgtttgtcaaattttgaaaatagatgcctcagttcataagatttccatattgtgtggcaggcgcctgtaatcccagctactcaggaggctgaggcaagagaatcacttgaacccgggagacagaggttgcagtgagctgagatcacgccactgcactccagcctgggcgacatagtgagactctgacaaaaaaaaaaaaaaatccatatgtgaaaattcttagaagcttcctatacaatttcagctgaagattcagccaacagttcattctgagactgtgttccatggaaaaagtaaagcccaggcatggaagtgggaatggaaagaaagattctaagcctacaaatactcaaacatcaagaagaaataaaaataagtcatcacttcgacttcatgtgctaacatcactgaggttataaattcccaggaatattttattgcgggagcaagactgcactgctgcctttcagcttgcaaattccagtgagaaacgtctttctctctgctctcaactaactctacagaacgctgtcctctcatttcttcaggctgcagttctagagtagggactcagagtgccactgttggccagtctggaaacagagataaatgagccaatccccagacattccggcttggtggcttttctaatttcatggaatgcaaatccaagagcagacccacaacattcctattatggctcctagttctacaaattataagcaggaacggaacggatttacaggcaatgagttcagctccttcttggctggagattctataatccaagaagagtttgaaaaggggcttatttgggctggagcagcagcaactctaactgtggaaaaggtggggaatggtgctggactgacagtctgggtagaaccaaggcgactactgcctcctttcctgctatttctatcctgctgggcattctctatgatgcagatccgttattcagtcctagaggagctggccaagagtttggtggtgggaaaccttgccaaggatctgggactcagtgtcgaggacatgcccacttgaaagcttcgggttaatgctgaggaataatacttcattctaagtggggaaagtggagacttacttgtgaatgactgaatggatcaggagcagatacgccccccaattatagcttgggccataacgctttgaaatagttgaaggccaggcatggtggctcacacctgtaatcccagcactttgggaggccgaggcgagcagattacgaggtcaggagttcgagaccagcctgaccaacatagtgaaaccctgtctctactaaaaatacaaaaattactgggcatggtggtgcaggcctataatcctagctactcggggggccgaggcaggagaatcgcttgaacccgagaggcaatcgcaccactgcactccagcctgggtgacagagcaaggcgccatctcaaaaaaaatgaacaaacggtagttgaaaattctttaaatgtttttcacattaatatggagattcaggatatgaagaatcatgcaccacggttcagcaggaatgttattaagttacgtatctctgagtttacccagctggaacaagatttgcaacagaacctgcagaagatcctgatgttgagagaaattccttacaaaattatcaccttagcagcaactctatatttctctttgaagtaaaagtgaccaacagtggaaagacatatgttgatcctgtgttagagaagctgcttgactaggaaaagcagagctcccatcccttagtgctagcagccttagacggccccccaacaaagcagcatcactcaactcctgatcctattggttgaagccaatgacaaccctgtgttcatctaggatgtgtacagcgtcggccttcaggaagatgtgcatccgggcactcctgtgctgagagtgagggccaccaaccaggactagagtgtcaaggcagagatcacatatggcttcacaacccagagtacccatatctagtttggccttgatcaaatagtggagaaatgaaaactttaagtacattggacttttaaagatttttaatttccatggttttggtagcaagtgacagagagggactcattgtccagtgtacagttgagaccgaatttctagaagataatgacaatatcctagaggcgatttttacttctaattccacaatgattcccaaagattctgcaccttggacagtaatcactgtccaggatttaaatcacaagatctttaaatcacaagatctggattcgggagaaaacgaggtcacatgtctgatataagaaaatgcaccttgagaaaaatcttcctccaataattaactacatgcttgtaacaaatggggccgtggaccaggaacagacccaaggtataacatcagcatcactgccactgacagaggcaaaccaaccctctcgtccagcccaagcatcaccctactcattggcgatgccaacgacaatgctctggttttctaccaggcctcctacgtcgtccacgtggccaagaacaatcttcccaaagcctccatagtgtgcaagtagacacctccaacctagacttgggacccaacagccaagttccctattccatcgtggccagtgacctggagccacaggcgctgtgattctaggtgtccttgagcgcacagtgcgccttcgaccaagagcagccgcgagccttcaagctcacgctgcaggcccgcgaccaggactagctcgcgctcggcgtcaacgtgagcctgcgcgtgttggtggacgacctgaatgacaacgcaccgcgggtgctgtaccccagctctggagcgcaatggcttcgcgctcttggatatggtgctgcacgccgcggagcctggctacctggtcaccaaggtggtggctgtagacgcagatgtgagacacaatgcgtggctgtcctaccacgtgctgcaggccagcaagcccaggctcttcagcctggaatgcgcaccgacgaggtgctgacagctcgcacgatgggccacaggaaagcgactcgccagcgcctactggtcgcggtgcactgcggtggacagccgctcctctcgctaccgccacgtcaccaccactaccgcccctcgtcgccgacagcctgcaggagactctgccagacctcagcgatcactctgcaaagctacagcctgaatccaaaattaatttatatctggtgattgccttagctttaatttcctttttattcttcctgattgcattgtttgtgctggttttaaagtgccgaagaccccaaaatgatcctgtctgagtctttcccacggatgtctatcccgcgctaagccccaggtttctgggtaactgtagctctatgatgccatattcctaccaggtgtgtgcttctcctacgaatccagggctgagtgaacttcttttttgaatccctacccctcaggactcaatagcagtttcactgcagaaagccccttggggaaggggatgattgtgattattctaattgcttgggcagaatccactctccaaggtgaaaaattcttgatgaaactaagttcagtcacaagcaggttttcttctagcattaaatattttcagagatctcagtaaaaagcatttctagcagcaagaccaaaggcctaagatgagaaatatttggcatggtgagcttgagggacagtagtcaggcagacaagagtatcagacatgccagagcatttggggcctgtaggtaaggagcatgttttgattatatatatttgtatgtgtttgattatattttataattttactttgatattcaaattgtactgatccaaaaataagggagggacaaatcttggccattgtagtatgagagatgtaaatttacaactcagaatccctgcttatcacttctccttcagcacacaactgtttcattttctatttaagaaacttcctctcactgcaaaaagacattctggctgataaagttagcctataatttcagtaaatctaagaatatgactaatggaagttgccagacctaaactttgaaaattattgttccactgaagagcgtcttatgactgagtgttccagtctccttctcaagctgaaccttgcttttcaaaccagattaagaacactatcataagttatactgcattttatttccctacccatgtccactgcatcattctctatagtacaaagagcttgtctcgccaggcgcatctataatcttagcactttggggcgccaaggcgggtggatcacttgagcccaggagtttgagaccagcctggacagcatggcaaaaacccatctctacaaaaaaaaaaaacaaaaattaacaaggtttagtggtccatgcctgtggtctcagctacttgggaggctgaggtgtgaggatcacctgagtctggggagattgaagctgcagtgagctgtggttgcgctcctgtactccagtctgggtgacagaattagaccctgtcccaaaacaaacaaacaaataaagagcttctctccttatgacttatttaaagcttgggaaattgttccaattcaaatgctttaaatggacttgagctaaaacagaatgtggtatatgaaatgttcttataatcaggtgattgtaaaaattgatccagataatgttagcatagcattttactgaactagtagtttacaaacacttcaaaaattatagaataacatttgcatataaaattcctcatacatttccctatcagtgaattggaagcttacaatatacaatattaccaaaaagacaaaaaaaatgaaaaggaaacagttacctttggaaaacataattaggtaaaatgggtaatatggaaagtctgaaaactgaaaaaattactgataagtcaagagaaaaggaatattagtaggaaaattcataaaagtgtgtctgactactcacagcaggtttccttattggtatgtattctgtggtccatctaagctatgttaattttattttaaatgctacctgggtattggcttctaaaaggaattcagtaaatcagataatttggcatcttcaatctagattctgatgctcacctgaaaagtctgctaaggattggaaaccaagaaaagtgaagtatctcaacagatatgtgtcacttgtgtgtactggattttttttttttttttttttttttttttttttttttgagatggagtttcactcttgttgcccaggctggagtgcaatggcatgctctcggctcactgcaacctccgcctcccaggttcaagtgattctcctgcctcagcctccctagtagctaggattacaggcatgtgccaccacgcccagctaattttgtatttttagtagagacggggtttctccatgttggtcaggctagtcttgaactcccaacctcaggtgatcttccctccttggcctcccaaagtgctgggattacaggcatgagtcactgcgcccggtcgcgtactggatttatattgtgtaatactttgctctagcagtatagtaggtgagacagtgactgtgtctagtgagcaaaaggcacttatttgacacttttgactcttcctttctacttaccttatttaaaattgatttttgcatgtggcatgatgcaccagttcattgaggtaggggttgaagttatttcccatttttttcaataccatttattaaaaatattttcctctttctgttgaatttgcttggtgcctttgttgaaagtcatttcactgatatatgtagttctatttctatattcttgatcatgtttcatttgtctattcttttactaatagcacactgtctcaattattgtagctttatagtaagtcttgctacaaagtcttactacaggacaaagcttgtaggatttttgaatgggatggcattgcatctatacctttatcagggaaagagggaaggagggaggaggatcatcttaacaatattgacacttcaaatccatgaacatggtatatatttccatttaattaggtctttaatttctctcagctatgttgtatagttttcagtgtagagaggtcatgtatatttctcattaaattgtccctacatatttgatgttttctaatgttattgtaaatagtatttttaaaattgtatcttctaattgttcatttctagtttacagaaaaatgaaaaactatgtttttatgtattctatatgcttttgaaaagtaagaggtgcaaagtgctctattcttacactatattgtgtgagaatataagtcgaaaccactctgcataagttcaggcttccattctcttcagtttgtaggttgagagaacccatccagaaacagtaaacattggtgtctgcccaagtctggtcctgggtggttcattcattcatttacataacaaatatttattaactgtctgctatatgcaaggcactgacctatggactaaggatgcagcaatgaacaaggcatatatgattcctgagttaatgggccctattctaatacatgatattttacaggtctgataaaagccaacaaggagaaatacaaaagcactaagagaaagcttatagtagggaagcttcgcctaatctgaaggtcaaggaaggctttctttttttcggaaagtgatatttagagagatgaatagattaataggatgagtagaagttatctaggtaacaaggaaagtaaaaaagaaattgtcaggcagaggaaatagcatgtgtaaagatctttttaaaaaataaaaggtgtgactcaagcaatttaaaagggctagggaggctagaaacagaaaataaatagatgaaactaataaggcagggagagccttgtaaatcacacttaaaattctggattttgttctaaatacccttgtacttaggagctattaaaatattttaaacaaggcagtgacaagatatttgaattattaagcttactctggctgctatatggagaattgatttatgagggttataaatagaaataggaagataagataggagactatggcaatattcctggtaagaaatggaagaagagctggcttggattaaaggggaggcagtggatgtagaaataaatggatgaattatagatatatttaggaaatgggttcaataagacttaataatggaataggtggaatataaatttcatgagggcagggggtgttttgtttattattatattcctaggtgtctgaaaatattgttgtgttgcctggcaagtggtagatcttcagtgaaatattattaactgaataaatacaatggataaatggggagcagggattaagagtgattcctgggtttccacattaaggaactggatggacaaagctaccatttgatgagaatggaagactaaagaatgatagatttaagagaaatcgagttgagttccagccatgttcatttgaaggatctgagaaacagtgcagatattcagtgtgtgattagacatatggtcatcattcttttttttttttgagatggagtctcgctctgtcacccaggctggagtgcagtggccctatctctgctcactgcaatctctgcctcccaggttcaagtgattcttctgcctcagcctcctgagtagctgggactacaggcgtgcaccaccacgcctggctaatttttgtatttttagtacaagacagcatttcaccatattggccaggctggtctcgaactctgatctgcccgcctcggcctcccaaagtgtggggattacaggcgtgagccaccgcgcccagccggttaccattcttttactctgagttcttccattgtgatcatctagtcagatgggtagatccttataaggctgagcataataagcttcctgatagctctacactggtatgttttggggttcatggctgagctacttttgtgttttatttatcttcctgatctctttttcactgtaagaaacatccagcacccagggaaatttgctgtctaattcatactccactcttcagactagtcctagtgttcagttttgttttgttttttttctgtgtctggaattctattaaaatgtgtcaggctgttttaatttttgttgtttaattttctttcacatgattatatgtgctccatggatttttttgtttgtttgttttttgtttttgtttttgtttaagcggggtcttgctcttgtcgcgcaggctggagtgcaatggcttgatctcggctcactgcaacctccgcctcccgggttcaagtgattcttctgtctcagcctcccaagtagctgggactacaggcacatgccaccacacccggctaatttttgtatttttagtagagacgggtttcatcatattggtcaggctggtctcaaactcctgaccctggtgatctgcccacctcggcctcccaaagtgctgggattacaggcgtgagccaccgcacccggaggaaatttttaacctcagtttttcttcaccatctgtaaaactgcatagaaggaatgtttaggataaaagatgcataacaatcataacaaaattgttgggttttaatgttatgagtacacttggaggattctatgtccacacataccttaaacatcctatagagtccttagcattttaaagttgaaaccaacagtatgaatgatggtagaattttcccccccaggaagttagaactgttccatatcttgatagagggatgggttataaggatgtacacattttccaaaactcattgaacttaagagtcttgcatgtgactgtatataaattatactttaattgaaaataaatttaagaaaataaaattggctgggcgtggtggctcacgcctgtaatcccagtgctttgggaggccgaggtgggtgaatcatctgaggtcaggagttcgagaccagcctggccaacatggtgaaactctgtctccactaaaaatacaaaaattagctgggcatggtggcggacacctataatcccagctactcgggaggctgaggcatgagaatcgcttgaacccaggaggtggaggttgcagtgagccaagatcatgccattgctctccagcctgggcaacatgaacgaaatgccatcttaaaaaaaaaaaattaaaagaaaagaaaattagcctcccccaccctcactatacctcagactcacccctgaaagatcactactattcatccctggttatgtacacttacaaacattttctgtgtgtatgcgaatgtatgtgtggggttttctttgcacaacaggatcattttacagtatatatactgttgtgcaacttgctctttccacttaatatctcaaggaatcttttctttgaatctttatagccatgtacctcaatcttagtagttttctttattttatttttgaataggaaatacatttacatggttttaaaaatcaaaacaatatactatgtatatattgagaagtctgacttccatccctatcctactcctattccacccttgcttcctcctgtcccctgtaggtaaacattttataactttattaagcatcctgtcagcatttcttatgcaaatatgtacatatatttttatttccccattttttttacaaaaagataaaatactatacaccactttatatcttcctttcttcacattatatcctttaaaaatatttccatattggccgggcgcggtggctcacgcctgtaatcgcagcactttgggaggccgaggcgggaggatcacgaggtcaggagatcgagaccatcctggctaacacggtgaaaccccgtctgtactaaaaatacaaaaaaaaaaattagccaggcgtgatggcgggcgcctgtagtcccagctactctggaggctgaggcaggagaatggcgtgaacctgggaggcggagcttgcagtgagccgagatcgtgccactgcactccagcctgggcgacagagcaagactgcaactcaaaaaaacaaacaaacaaacaaaaaagaacttccatattaatatatagaaagctgttttttttaacagttgcttagcattcctttggattattaaccagtctcataaatgagcgctattgaatagccctgtacctacatcagtttttacatatgcagtatatctttgggatgaattcccagaaatggaattgaaattgctgggtcaaagaggaaataggtgtaattttcttaggtattttcacaagaagtgttaattctaactttctgttttgaaatgatttcaaattttcaaaggagttgcaagaattgtacaaagaactgtatctccttcacccggatgcaccgggtgaattatatgtattatataattgtatctgtaggccaggtgcagtggctcactcctgtaatcccagcactttgggaggctgaggcaggtggattacttgaggccaggagttcaagaccagcctggccaacatgataaaactccatctctactaaaaatacaaaaattagccaggcctggtaccccatgcctaagggtgaggcatgagaaatgcttgaacctgggaggcggaggttgcagtgagccgagatcgcaccactgcactccagcctgggcgacagagcaagactctgtctcaaaaaaaaaaaaaaaaaaagtaaaaaagttttttaaaaagatgtatctatatatacatatttacatacacacccaagtgtgtatgtatatatgtttgtgtgtatgtacacaaacacattatttttatatgatatgatttttttatgacatgattatttttatgacatttgagagtaagttgtagaaattatgtttctttattcctaaatacctcattgtgtatttcctaacaaggacattcttttatataattaaattttaataataaaaatcagaaaatttaacatcaatgcaatataattatttagcctatagtccatatttaaattctaccataccttatagtatattttactatacctcatagtaattttttttagtccaaaatatcacacattgcatttagttgccatgtctcttttttttttttttttttgagacagggtctcactctttcgcccaggctggaatgcagtggtatgatcttggctcactgcaacctccgcctcccaggttcaaatgattctcctgccttagcctcctgagtagctgggactacaggcatgtgccaccacactcccaccacacccagctaatttttgtatttttagtagagacaaggtttcactatgttggccaggctagtcttgaactcctgacctcaagtgatctgcccacctcagctaagtgctgggattacaggcgtgagccaccatgtgtggcctagttgccatgtctctttaatctactttaatctgaaacagttcctcagccttgtttgtttatatgaaactgacatttgtaaagactagaagccatttgtcttgtataatgcctttaatttatatttgttttatgtttcctcgtgattttatatatagagtttgtttgtttgtttgtctgtttgtttgttttgagatggagtctcattcttgtcacccaggctggaatgcagtggcgcagtctcggctcactgcaacttctgcctcccaggttcaagcaattctcctgcctcagcctcctgagtagctgggattacagatgcctgccaccatgcctggctaatttttgtacttttagtagaaacggggttttgccatgttgcccaggatggtctccaactcctgacctcaggtgatccgcccgccttggcctcccaaagtgccgggattacaggcatgagccaccgtgcccggacctcatgattgtatttatttatttatttaatattattattattatttttttttttttgagatggggtcttgctctgtcacccaggctggtgtgcagtggtgcgatatcggctcactgcaaccgctgcctcccagattcaagcaattctcctacctcagcctcccaagtagctgggattacaggcatgtgccaccacacccggctaatttttttgtattttttttagtagagacgaggtttcaccatattggccaggctggtctcgaactcctgaccttgtgatccacccaccttgacctcccaaagtgttgggattacaggcgtgagccaccacacccagccttatgattgtatttagactagacatttttttggtagtatattatttagccattgctgtgtaacaaattatcccaaaacttagtggcttaaaagaagcatttattatctcataaattttgtggatcaggactgggtatagctttgctgagtgcctctgcctcaaagtcttacaaggcagcaattaaagtgtcacctaaggctattgtcttatctgaagggtcaacagaggatggatccgcttctaatctctctcacatagttaatggcaaaattaagttccttgtggattgttagactaagggttccagttccttgctggttgttagcttgaggtctacctcagttccttgccatgtggacctccatagggcaaccagcttctgttagagcaagtaaaggagagtgccagagagggcaaatgtgatgaaagccacaatctttttataaacctaattttgaaagtgacatacaaggctaggcatggtggctcaaacctgtaattccagcactctgagaggccaaggagggtggactgcttgagcccaggagttcaagaccagcctgggtaacatgacaaaaccctgcctctactaaaaatacaaaaattagctggtctggtggtgcatgcctatagtcccagctactcaggaggctgaggccagagaattgcttgaacccaggaggcggaggttacagtgagccgagatcacaccactccactccagcctaggccacagaatgaaaccctgtcaagaaagaaaggaaggaacaagggagggagggaggaaggaagggaggtagggaggcagggaaagaccgagaaagtgacataccatcatttttgctgtagtttgttcattagaagcaaaatcacttggtccagcccacactctggggagatgattttctaactccatttgtaataacttattctacttttattagttggcattatacagtaagaaagagctttcttttctcttcttatttattcatatatggctcatgtgttttttccaatgagttatattctattactaacattttttattttgacctcaaattgttttagatgttaccaataagaacctcttcaagctggttcttgtgtccttttgccataactctctcattttcttgaaccctttcttactttctgatataagaaaatattagagactcatactttccttgttccagttctgagatgaaccatttatccaaaagccttgcttcattttagtagggaatagtatttagaaactaagatctgggtgtgaggtatgctcactgctaatgggctgtcactgtttctaggccttgtcagcagacggagctaggaaaaacacacataaacacacccatatttatatttgtacacacactccctcaaaatcgtgagttcatattgatacctccagttctggttcttcctagccttccccctttccatctttgtatttttattttccaacagtaagaaccctggctcccagtgctatgaatatatttactcatttgctccatccactgcactccagcctaggccacagaatgaaaccctgtcaagaaagaaaggaaggaatgagggagggagggagagaggaagagagagaaggaagaaggaagggagggagggaaaactgagaaagtaacataccatcatttttgctgtagtttgttcataagaagcaaaatcacttggtccagcccacactctggggagatgattttctaactccatttgtaataatttattccacttttattagttggcattatacagtaagaaagagctgctgaagatttgcttgcaattggttgtctttaaactgagggtatattgtcaaagtactgtgctgaaaagttacctgtagtatagttatgtgattcattaaaataaagtttgtttctattatgtgcagttttagagttttgccacactctggttgattagtatattttctgttgcttttttgttttgttttgttttgttttgtttttgagatagggtctcgctatgtcacccaggctggagtccagtggtacaatcacagctcactgcagcctcaacctcgtgcacttaagcgatcctcccacctcagcctcccaaatagctggggctgcaagtgcacaccaccatgactggctaattttttaattatttatttatttatttatttattttagagatggggtctcactatgtttccccaggctgaccctgaactcctggggtcaagtgatcctcctgccttagcctccaagtgctggtattacaggcataagccaccacacctagcctagtattcttttttgaatatgtaaaacattaacataaagtcaaaactattaaaaaaaggtgtactcagaaaattgtcattcctcccctataccttctgcctcattcacaccacactctgtagataatcgatttcattagtttgtggtttatcctcactgtgtttctttttgcaaaacgcaaaaacaaaacctatacatatttatattttcttatgtcctcttctttcttacacaaaaggtaacacactatgtaggtagtcctggctttgaacagtttcactataaaaatatttgttactacagcttaaataacataagtctcctaaaaataattcaaattttagttaccatggtatattaactttgagtagttccataaaggacaaacttggctgctagcccttcagtccacagagcactttgaaaataacagatgagcaaaataatgtggccaatcacatgacttctttcaaagtatgtcagtgatcagtcactgtgtgcctataatttagttcatgcacagacagcaaagcatgtagttgtgttgccttccagtgataaacccacataacattttagaaaaatgtattaagaattggccagcaaagataaaagtgcagcaaagaaacaaaagtgataatgttttcagtgaaatttgaattgaacataaatggagttatagaagaaatagctgaccatgggaatgttcacactgctactttcaagaatctctagaagggcagctaaaggagcttagtgaaggtgaatttattgacatgaatgagaaaagtaattgtgatgaaaaggatgaagatgtcccagagaaagtaatgccagcaaaaacttcacattaaaggaactctcagatatttcaaagcattgaaacctccaagaataaataaaatgttggaagttgatccaaacttagaaaggagtatggcaacttgtcaagatgaagaaaaggtgcttattcctttttatttatttatttagagacagagtttcactcttgttgcccaggctggagtgcaatggcatgatctcagctcaccgcaacctccacctcctggattcaggcagttctcctgcctcagcctcccaagtagctgagattacaggcatgtgccaccacgcccggctaattttgtatttttagtagagacagggtttctccatgttggtcaggctggtctcgaacccccaacctcaggtgatctgcccacctcggcctcccaaaacactgggattacaggcatgagccaccatgctccacctgcttattccatattatatgttataggatgaaaagaggccaaactaatcttgacatgttttttacaaggaaataatcctccatggttctaatttttttttttttttttttttttttttttgagacagagtcgcgctctgtcacccaggctggagtgcagtggcacgatcttggctcactgctagcaccgcctcccgggttcacgccattctcctgcctcagcctcccgagtagctgggactacaggcgccggccaccacgcctggctaattttttaaaaaatatttttagtagagacggggtttcaccgtgttagccaggatggtctcgatctcctgacctcgtgatccgcccgcctcggcctcccaaagtgctgggattacaggcttgagccactgcgcccggtgggtctaatgttttaaattacactgtgttaaataaatattagtttgttggttttttttttagtttttttatttctctacaaatttacaaccaataagagtttttaatgctttgacaaaaaatgttaaaggtcatagtacaatcgcatttcttcccattgattattaacatcactttacatagtttcatcttgcattagcaattttgtgtgtgtgtttgtggttttaaggagcggagagtttaataggcaagaaggaagggagaagacagaaggaaggagctcccccttacagagacagagggagcggggctccaaaagaggaggtccccatctaccgcggataccagccaggtatatatgcagaggctggtggaggtgatgtctgatttgcatagggctcaggggattggtttgaccaggcatatcattcacgtagcccgagaaaaagctggccctcccaccccagccttttaatatgcaaacgtagggcgccatggatgttctaaacacgtggagatatgtggggggcagccatgtggccaggaacttgtggggcaagggcaagaaggctgtgggaatcgccaagttgaatggacctagtttctaatggcctgcatttgcatatcaaaggttgctggcctggctcctagagccggggctttaaaagaaacttttccggagatgctttaaaaaatgaaaacttcccaaggaccccttttcctgtctatctgcataaaataatttcttttattatttatttatttatttatttatttatttatttatttatttatttatttattttgagacggagtctcgctctgtcgcccaggctggagtgcagtggcgcgatctcagctcactgcaagctccgcctctcgggttcatgccattctcctgcctcagcctcccgagtagctgggactacaggcgcccaccaccacgtccggctaattttttgtattttcagtagagacgggatttcaccgtgttagccaggatggtctccatctcctgacctcctgatccgcccgcctcggcctcctaaagtgctgggattacagaataatttcttaataactcctaccacattcctccctgtggcgatatcaaactaactgctgttaggaggctttgggcgaccattgcttctggctacttcctgctgaaaaggggcgtctaatggagaacagcagctagggctcctcctggggttgatctaagggtcctcggaagaatggcgtccatgtgtggttcagtttacagcaccgtttggagtttgattgcttctaggcgagaagaaacaattcaagttatagtattgagtatacagagtccaaatatcaatacaagacatataagcaagagagtgcttaataaaggggttaaccaattccataaagaagactggaagtaattaaagagggattgtagccactcggggctgaagcccacattttccctgagcctgtcaataattttgatttgatttttaagtccctgtagatttgcctcttctttactacaggtgttaatcccaaagaagcatgtttcatttaaaaatgcattactggccaggcgtggtggctcgcgcctgtaatcccagcactttgggaggctgaggcgggagcatcatgaggtcaggagtttgagaccagcctggcctacatggcaaaaccccatctctactaaaaatacaaaaaattagccatcgtggtagtgggcgcctgtaatcccagctaattgggaggctgaggcaggagaatcgcttgaacccgggaggcagaggttgcagtgagccgagatcgcaccactgcactccagcctgggcaacagagcaaaactccatctcaaaacaaaacaaacaaacaaacaaacaaaaactgcattactaaatccaataaaaagtcctagtagactcagtgatagtaaaactttcatgcttcctttttgccagtaactattatccctgctataaggatactaattaagcaaaatacgacagcaatggaaactctgtccaatatttcagttagaaggtgctaccatggataaccctattgcaaatagtagagtgaggaaagcagttcccacaaatgtggtgtggtaggtaatttccatctaaaattttacttgccaacatatagaattcccctctgtgggcctacgaagttccttggttttattttcccaaacaaagaaacctccgggttacaggtaccttacttactttcattacctggcacaatttgcaaaataattgcccagaactagcatattgattcacattttcacattacccatccctttttcccccccaccaagctgcagaagatcaccacttgattcacaggaataagcagggccagggttagtctaaaatgtaggcaaaaagcttaaaaacaattaatgagactagggtttaatgacaaatgtatgataagctttggagcaaaatttttctctccagtcctcatttttggtaaaaactaattatgaatgaactttaatcttatacttggcctgattatttgcatgaagtgcagcaagaatggttatttctacataggacttttggattggctttgatgaaacactgttccacaaggaatttcagattagacttttaaagctgagcccagacatgggtttgtatcctctaatacctgtgagttgggttatcctctcctcttgaggtcccaagataaactcagagcttccagacctgttagaaagtgacattcttcactgaccacaggttaggaaccctgtgtggggactgtgtagacaaggtgtgaggccagttctccccaaggggcttttattggctctgcatgtcaagcttgattccttaaagggaaacacaccctttcagttaaagccttggcaaaataaccggtttttccaattgtgttctgttgacaaagaaaaatggattcttgctgcactgatgcgaacaactatattgccgtaagttaagagtacttacagatagtctccaaattttagaggaaccaggcagagaaaaatgaacatgctccaaattttgttcacagtagtataccttacttgattattaaaggccataaatagtttaaaataagtttcctttcccagtccatgcaccaaaatgatacggctctgatgagtggaggaacaacagggttcctggtcctcatgctggtttagataaaatgacacagacacatgtggagtggttttaaggagtggagagtttaataagcaagaaggaagggagaagagagaaggaagacgctcccccttgcagagacggagcgggggttccaaagctgaaagaggaggtcccccacattaacaatttttaaaataccgtacaactgcagaaaatgaggactgcctgtacatactgtttgacactttgtttttttttttaacttatcaactttattttgtttgtttgttttggttttgggtttttgtttgtttgtttgttttggagacgagtctcactctgtcagccaggctggagtgcagtggcacaatcccagctcactgcaacctccacctctcgggttcaagcaattctactgcctcagcctcccgagtagctgggattacaggtattcgccaccacatccagctattggttttggtttttgagacagggtcttgctgtgtcacacaggctggagtgcagtggtgtgatctcagctcactgcaacctctgcctcccaggctcaagtgatcctcccacctcagccttccaagtagctgggactacaggcatgcacaccatgcgcagctaattttttctattttttgtggagacggggtctcactatgttgcttaggttggtcacaaattcacagcctcaagcagtcctcctgcctcaccctcccaaagtgctgggattacaggcatgagccaccacatccagccttaccagctatattgaagtataatttatataacataaaatttgccttttaaaattatacagtgcaatgcattttgacaattgtttacatctgtgtaaccaccatgcaatcaaaatatagaacatttctataaccttcaaaagttccctcatgcccctttgcaatcaattcactacttctccagctccaggcaacaactggtctgcttcctgtcactataaattagtgttgcctctttcagaatttcatctaaatggaatcctataacatatactattttgtatccatcttcttttactccaaagttcttgaaattcattcatgttcctgtgtgtatcagcagcgtgttccatttgattgttgagcagtattgcattgtgtggatatatcacaatgtgttcattcattcaactgttggtggacatttgagttgtgtccagtttagtgctattctgaattaaagtgatgtgaacaatcatgtacaagtatttttgtaggcatattttttttatttctcttggataaataccccaaaacagaattgttttgggggtcatatgaaatgggaagtatatgcttaactttataagaagctgccaaactatttttcaaaatggtaatatcactttacattttcatgagcaatgcataaagcgttccgcttgctacattttctcaccaatgcttcctattgtcaattttttaaattttagcaattctagtgggtgtgtgatactatctcattgaagtttcaactgtttttccctgttgactagagacactgagcaacttttcatgtgttgtctatttgtatatcttcttgaagcattcgttcatctttaactgagctgaacgccttcttaaaattgagctatgggagttttaaaatatatccttgtagctgggcgtgatggcaggtgcctgtaatcccagctactcaggaggctgagacaggagaatcgcttgaacccaggaggcggaggttgcagtgagccgagactgcaccactgcactccagcctgggcaacagagtgagacttcatctaaaaaataataattatacatgtaattatatatgatttttatatatgtaatatatatattcttgatgtgagctctttgtcacatacatattttgtggatattttatcccagactatgacttgtcttttcattttcttagttgtgtcttttgaagagcagaagatgtaattttgataaagcccaatttattttttcttttatagtttgtatttcttatgtcctattcaaaaactccttgcctactgaaaacttatgatgattttctcctatattttcttttagaagttttatagttttaccatttataatttggtctatgaatccttttgagttgatgtttatgtatggtgtatggtgtgaggtaacaatgaagattcatatttttttccaaaggaatatccaattgtctctttggaaaaatatgctgagaaggctatcttttccccaccaaataatcttagcaccttaatcaaaaatcatttggccatggacatatgtaggtgtgggttttttctgggctctctgtgttagatggatagatagacagatacagatatataactgtgtttacacatatgtaactgtaaacacagttatatatctatatatccaccaacagttgaatgagaataaactattgttataagcatatatacacattgtatatatatgtgtacatatacatattgcatatgtatgtatacatatatacacacaaagtatatatatgtatgtatacatatatacacacttaaagtaatggcctccagttcgatccaagttgctgcaaaggacattatttcatgccttttcgtggctgagtaatattccatggtgtatatatatatatgtgtgtgtgtatatatatgtattatgtatatatatatgtgtgtgtgtgtgtgtgtgtgtatatatatatatgtgtatatatatataccacattttctttatccactcattagtcgatggggacttaggttggtttcacatttttgcaattgtgaattgtgctgctataaacatatgtgtccaagtgtctttttcatataattacttattttcctttgggtagatacccaatagtgggattgctggattgaatggtagatctgttttttgctctttagagaatctccatactgttttccatagaggttgtactaatttatattcccagcagcaatgtgtaagtgttctcttttccccacatccacaccaacatctattgttttttgactttttaataatggccattcttgcaggaccaaggtggtagctcgttgtggttttaatttgcattttcctgatgattagcgatgttgagcattttttcatatgtttgtgggccatttgtataccttcttttgagaaatggctatttgtgtcctttgcctactttttaatgggattgtgttttatttttcttggtgatttgttagttccttgtagattctggatactagtcctttgtcagatgtgtactttgcaaagataatattttggatgttatatttccattataatttagttcaaagtattttctaatacaccttgcaatttcttctttgacccatggattattttaaagtttgttattttgtttgtttattttgagacagagtttcactttttttgcccaggctggagtgcagtggcacaatcccggctcccagattcaagcgattctcctgcctcagcctcccaagtagctgggattacaggtgcccaccaccacacccagctaatttttttttcttttttttttgagacagagttttgctcttgttgcccaggctggagtgcaatggcacgatctcggctcactgcaacctctgcctcctgggttccagcaattctcctgcctcaacctcctgagtagctgggattccaggcatatgccaccacgccaggctaattttgtatttttaatagagacggggtttcttcatgttggtcaggcgggtcttgaactcccgacctcaggtgatctgcccgccttggcctcccaaaatgctgggattacaggcatgagccactgcacccagtccaattttttgtatttttagtagagatggggtttcatcatgttggccaggctggtcttgaactcctgacctcaggtgatccgcctgcctcggcctcccaaagtgcagggattacaggtatgagccaccatgaccagcctaaagtgtattgtttagtcaccaaatatgtaagtattacccaaatatatttgtcactgatttctaatttaattgtattgtgatccaaaaatatacattgtatagtttctattcttttaaattcgttaacatttcttttatggcacagaatatggtctatcttggtgagtgttgcttacacacaactgtgtaactgaaaactgtgtattctgcttctcgtggttgttgtatcctataattgtcaactagatcaagttagtaagagtgttgttcagtgatcttttcttcttcagtgtttactgtatttgctaatcccatccagtgaagtttccatttcatatattgtatttttcacttttagaagttccatttgactctttcatttccatcctcaattatcttcatatttttctttaaatttttgagcacatttataatggaggttttaaagtccttgtctgctaattttgtcacctctgtaattcctatgatgattttcttcctggcttggggtcataatttgttgcttatttgcatgtctaataatgtttttattggacagcagacattgtaaatgttatatttttgagtgtttggattttgtctttctttaagaactattgcagtttgttttggaaggctattatgttttttgcagatcaggttgatcttttcaaggcttgtttttaagctttgttaggacaggtctgtagtaacttttgccttgggctaatttagacctaccacttaattctgacttttttgattaatctgagtgttcagcagggtctctttattatggctaaatgaaattcaaacattttccagccctatgtgaccatcaagaattcagctaatagctccctggcagttcttcgcccagctgcagaaaagtgtcagtgcactctatgtatgctcagattattatttagccaaagacttggggatccatattaatattcctggagttctttgtgtagctccattctctttagtactctatcccataaattctggctgcctcaatctcctaatctccccaaactctaatatctattcctcaactcagcaaaaccatggtgttattcttggatttcccctttcctgccccacagtctgaaagttgtctccaggcaaaaaaaatggagatcctagtttgcggatcctcatttccttctccttttttttttttttttttttttttttttgagatggagtctcgctctgtcacccaggctggagtgacgtggcgtgatctcggcttactagaaactccggctcccgggttcatgccattctcctgcctcagcctcccgagtagctgggactacaggtgcctgccaccatgcccggctaattttttgtattttgtttagtagagacggggtttcaccgtgttagccaggatggtctggatgacctcgtgatctgctcacctcggcctccaaaagtgctgggattacaggcatgagccaccgcgcccggcctgcttctcttctcttatgggttagaatcctgcactgtcttttgaacaaatgtctaaaagcttttatcacacattttgatccacttcccagttgttatagtggtatatctggtttcacatgactgaaaggaaaagttttcaccttgctttttgtactaataatatatcctggaaatcattctatataaatttatagaaatcttcatttttaaaatagcttcataaaactccattgtaaaaaccaggtgcagtggctcatgcttgtaatcccacactttgggaggccaaggcgggtggatcacctgaggtcaggagttcaaggccagcctggccaacatggtgaaactccgtctctactaaaaatacaaaaattagctgggtgtggtggtgggcgcctgtagtcccagctacttggaaggctgaggcaggagaattgcttgatttcaggaggcggagattgcagtgagctgagattgcgccactgcactccagcctgggctacagagcgagactccgtctaaaaaaaaaaaaaagcaaaaaaaaaaactccattgtatgtgcacatatcattatctgttcaacccatctatgacttgtcatttaggtagtttccatccaatatttttgcaatataaaaaatgctaatgaagaacctgagatatatatatatctatatatatagatatatatgtttgttgttgttgttgttatttttgaagtatgtacgtataataaattcctaatagtgtgattgctgcatcataaggtaaaggcatatgtagttttgttaaatatagctattccccatcttgcattcctacaaatagatgagaatgtccattgtcccatagtctcctttgcagagtatattgtcaagctttttaattgttgccaacctgatgggtaaaaagatatctccaaataattttaattaaaatttctcttattatgaatgaggttaaatagtttttcatatgtttaaaagccagtttatatctttttgtttttttagagacaggaatcttgttctgttgcccaggccaaattgcagtgatgcagtcatagctcactgtagcctcgcactcctgggctcaagcaatcctcctaccttagcctcccaagtagctaggactacagatggatgccaccatgtccagctaatttttttatttttttgtagagatgtgaggtctcactatgttgcccaggcttgtcttgaactactggcttcaagtgatcctcccacctcagcctcccaaagtgctaagattacagccatgaaccaccacaaatgaccctatatatttttttgaattgtctgttcatgtcttattttcatttttctagtagttttttttttaagtgttttagcctaaatttgtaaaaagtttaggggatatatgaagggactctaaatgtttatgaagaaatttaattaaaagataaaaataaaaatataagctttatttttcaacatgagctccatcaagttcaaggcacttttgtaagcaatgatactagccatttagttcacccctaaagaactgagagtcctgggaatttagccatgtcaatgcagtattttttatattggttactgaagaaaaaatgggtgccctttaaagttgtaagattaggaacaaaaacaagtcagaagaagccaaatcagcactgaaaggtgggcacttaatgattacccaagaaaactctcaccaaattgcccttgcttcatgagaggaatgagcgggagcattgtcgtggtcaggaaggattctggggaagttttcccaggcattttttctgctgaagctttggtaactttctcaaaacactctcataataatcagatcttatcactctttggccctccaggaagtcaaccagcaaaatgctttgaacatcccaaaaaagcgcttgccatgacatttgctcttgaccagtctgcttttgcattggtcaaatgccaccacttccacctcttgtgctttgttttcaggatcagactggtaaagtcatgtttcatctcttgttacagtttttttttttttaagaaacccttcaggatcttgatcacatttgtttaaaatttcaactgaggctgggcccagtggctcatgcctgtaatcccagcactttgggaggccgaggcgggcaaatcacgaggtcaggatttcgagtccatcctggctaacatggtgaaaccccatctctactaaaaatacaaaaaattagccgggcatggtggcaggcacctgtagtcccagctactcgggagggtgaggcaggagaacggcatgaacccaggagacggagcttgcagtgagctgatatcatgccactgcactccagcctgggcaacagagtgagactccagctcaaaaaaaaaatcaagtgaaaactctggtcttaaactgcagctgatctattttatttttattttttttcagacacagccttgctctgttacccaggctggagtgcagtggcaccatcatggctcaatgcagccttggcctcgtgagctcaagcaatcttcccacctcaggctcccaagtagctgggactacaggcacatgctaccatgcctggataatttttttgcagctaatctagatgtaatggttttggcacccatctaatggaaagtttgctcaactttaatttttcagtcagaattgtgtaagctgaaccgagatgtctatggtgttggctattgtttctgctgttaattgtaggtcttctttaattagagcacagacaagatcattttttttcctcccaaattgatgtagatggtcttttgctgtgggcttcatcttcaacattgtctcatcccttcttaaaacaagctagctacttgtaaactgccgttttctttggagcattgtctccataaacttttcacaaaacatcagtgatttcaccgttcttccactcaagcttcatcataaatttgatgtctgttcttgtttccattttagcagaattcatgttactctgataggggctcttttcaaactgttatcttattcttcttagtgcctcaaactagatcctattcagacatggtataacaagttagtatgggtttattttggtgcaagaaatattttgaaatccacacatttttttcataatatgcattttccatgaagtttttgaaaactccttgtattaggaatattagtcctttgtccagtaaacagactgcaaatattttctcacagctcatcatttaccttttggcatttttttgcaatgcaatttttttccctttgtttttgttttttgtgtaatgaatcaatgttttcttttttttttttttttagaccaagtctcactctgtcacacaggctggagtacaatggtgcaatctcagctcactgcaacctctgcctcccaggttcaagtgattctcatctctcagcctcccaagtagctgggattacaggcacatgccaccatgcctggctaatttttgtatttttagtagagatggggtttcaccatgttggccaggctggtctcgaactcttgacctcaagtgatccactcacctcggcctcccacagtgctgggattagagacgtaagccactgcccccggccaaatcaacgttttcttatattgcatttaggttttaagtcatagttagaaagcctttccccacacctaggttatagaaacattcattacttttttcttccagtgctagtacttgcatggtttttggtttccacatttagatccctgatctaattggagtttattcttttgtgtgctgagatatggatctgattatatcttttttcccaaatggctatccagttgtcccaatgccatttattaagcacttcatctttgtcccagtgatttgagatagcatctttatcatgtaccaaacttctatagtgccagaagatttttattttttttagacagggtctggctctgttgcccaggctggagtgtagtggcacaatcccagctcgctgcaacctccgcctcacatgctcaagtgcccgcacctcagcctctcaagtagctgggactacaggcacatgccaccacaccaggctgatttttatatttttttgtagaatgagatttcaccatgttgcccaggctggtctcaaactcctgagctcaagaaatccgcccacctcagcctcccaaaatgctaggattacaagcatgagccaccacacccggctgccagaaaattttaatgatcagaaaaccacaattctttcttcctctgttatatgttgaagtaaaatacttcatttagaaaactaagccgggcacagtggctcacacctgtaatcccagcactttgggaggttgaggcaggcagatcacctgaggttaggagtttgagaccagcctggccaacatggtgaaaccctgtctctgctaaaaatagaaaaatttgctgggcatggtggcgggtgcctgtaattccagctacttgggaggatgaggtaggagaattgcctgaacctgggaggcagaggttgtggtgagccgagaccacgccattgcaccccagcctgggcaacaagagcaacggtaaactccatctcaaaaaaaaaaaaaaaaaaagaaagaaaaaagaaataactcagccatacaaggctacccatttggtgagaactaataataagttagatagcaaggtaatagcaaaatgtgggtgcaaaattaaagcaagttatttctgaggagaatgtaggtctcatggaagattttcatgtggacaaatttagtaaattttttgcaggtagtttcctgacatatttaacatttgtgatatagtaaacaataagaaggtactaaaggctgggcgcggtggctcacgcctgtaatcccagcactttgggaggccgaggtgggcggatcacaaggtcaggagatcaagaccatcctggctaacacggtgaaaccccgtctctactaaaaatataaaaagttagctgggcgtggtggcgggtgcctgtagtcccagctactcgggaggctgaggcaggagaatggcgtgaacccgggaggcggaacttgcagtgagccaagatcaagccactgcactccagcctgggcaacagagcgagactccatctcaaaaataataataataataataaggtactaatatgatccagactagaagagaatagcactaaaatgggagatggggtaaacctgtggttttttttaccttaggcttttgacttccaaaattattgtttttgctgggtgcggtgggtcactcctgtaatcccagcactttgggaggccaaggtgggaggattgcttgagcctaggagtttgagaccattctaggcaacaaagcaagaacctgtctctaaaaaaatttaaaaattagccagaaatggtggcacatgtctgtagtcccagctacttgggaggctgaggcaagaggattgcttgagccttttgaagttgaggcttcagtgagccatgatcaccccactgcactccagcttgggcaacagagcaagaccccatctcaaaaaataaaacaaaatagactgggcacgatggctcacgcctgtaatcccaccactttgggaggctgaggtggatggatcatgaggtaaagagatcgagaccatcctggccaacatggtgaaaccccgtttctactaaaaatataaaacttagctgggcgtggtggtgcacacctgtagtctcagctactcgggaggctgaggcaggagaatcgcttgaacccgggaggtggaggttgcagtgagccaagattgtgccactgcactccagcctggcgacagagtgagactctgtctctaaataaataaataaataaaacaaaataagtaaaataaaataaatgtttgtagttccaaaatattttgatgacataatttcttcttgttctaataaaactacatatgcattggtcctatgacctagtaatcacactattaggaatttatcataaatacacacctcaaaaattacaaaaatacatatataccagcttatttattacagcgttatttgtaattgcaaaaacattgtagatagaatggaggtcacataaaacttattcttaagattcagaccgggtgcaatggctcacgcctgtaatctcggcactttgggaagccgaggcaggcagaccacccgaggtcaggagtttgagaccagcctggccagcatggtgaaaccccatctgtaccaaaaatacaaaaattagctggtcgtcgtggcacgcctgtaatcccagctactcgggatgctgaggcgcgagaactgtttgaaccccggaggcagagactgtagtgatctgagatcatgccactacattccagtctgagcaacagagcaagacttcgtctcaaaaaaaaagatcatagatcatcttatcaaatcaaagtatgcaaaatattcaagtaaacttcagataaatatgaaggctaaaccattcagcttcttcaccaaacccttgaatgtcccacctgtctaaatggagatacatgtttgtttgatttattggttaactgtttttattccatttttcctcaaatgatcccataatttgaccttaggaagctgttcaaatagacacattaggttgaatggaaagactactcgatgatatttaggattttaagaggattttatgtattttttccttgtgtgcaataatttaatagcatcttgaataggattttctgatattactaaccctctgggaataatattaggtaattagacagttagctaatattaaaatatgtatcaggtaatatttattgagagtttcctctgtgccaagcaggatcaacttcataggcaggcgacctgtgcggggacacagggcttcatgcttagataggcccccttgctttgaaggcccctaccctttggttagggctctgctgttaccatcttgaaattcttaataatttttattttatttttttgagtcagggtcttgctctgtcgccctggctggagtgcagtggactcactacagtcttgaattcctgggctcaagcaatcctcccacttcagccttctgagtagttaggacgacaaacacacgccaccatgctcagataagttttttgtttgtttgtttttttgtttttgtttttgttttttgtagagatgggactgtccctatgttgctcaggctggtctcaaattcctggcctcaagtgatcctcccacctcagcctcccaaagtgctgggactacaggcatgagccactgtgcctggtcaatcatttttattaacaagcccaagccctcttttttttttttttttttttgagacagggtctccctctgttgtccaggctagagtgcagtggtgcgatcttaccttcactgcaacctctgcctcctgggttcaagtgattctcctggctcagcctccctagtagctggaattacaggcacccacccccatgcctggcaatttttttgtatttttagtagagatggggtttcaccatgttggcaaggctggtctcaaactcctgacctcaagtgatccacccaactcggcctcccaaagtgctgggattacaggtatgatccactgcgcccggcctccaagccccctatttttattttgcactgaccctacaagttacgtagctaggcttagttatgtttttagcaaggaaagtgtataatctcatgtaccttttgaaagattactcaggtctctgcatgtgaaatggaatttagggaatgcaagagagggagtaaaaataacagcgaggaagctatgatagcatttaaggttgctttgactcaggggtagcagtagatagggtaagtaattgatagtttcaaaatatattttgggagtagtaagcattggtatggattagtaatatactggatgtggggatgcagaaaaaaatattaaaaattacttctgaaattctggctggaatagaagtgccacttaccaggtaaggaaggttggagacataacatatttgagggtgtggtcaaaagatgagtttgacattatgctatgtcatataaaagacatataaaagactacctattttataattcctttttaataaaatattcagaaaaagcaaaactgtggttgcctgaggctgaagctaggaagattgactacagacaagcatgagggaaattttgggggtgatgagagttttctaaaactggattgtggggttggttgcattactgtataaatttattaaaaatccctgcatcgtataggggcactatattgtatgtagaaagctgtgaaaagattttaaaaatgattgacatgtctgtggttatatcaatgagtactattattattcccattttatacataaagaaaataaaagagaagttaaaaataaaagtttcatggttacatagctactaggtgtaatatccagtattggaatttgaatctttttgacactaagaccttactctcgatcatataatacattcactttctattttaaagttatattatagccgggcacagtggctcacacctgtaatcccagcactttgggaagccgaggcaggcagatcacgaggttgggagatcgagaccatcctggctaacacggtgaaaccccgtctccactaaaaatagaaaaaattagccaggcgtggtggcacgcacctgtatcccagctactagggaggctgaggcaggagaatcgcttgaacccagaaggcagagcttgcagtgagacgagatcgtgccactgcactccagcctgggtgacagagtgagacaccatctcaagaaaaaaaaaattatattataaatgctgcatctcattggtcagaagctctcttgaaattataaaacaaagaagaaaaaagataaagactgggaaattgtgttgaatcagtatataaatcctgtatactggtccttccatttcccctagaaataagtgatacaggccaggcgctgtggctcacacctgtaatcccagcactttgggaggcggaggctggcagatcacctgaggttgggagttcaagatcagcctgaccaacatggagaaacccccgtctctactaaaaatagaaaattagctgggcatggtggcacatgcctgtattcccagctactcgggaggctgaggcaggagaattgcttgaacccaagaggaggaggttgtggtgagccaagattatgccattgcactccagcctggggaacaagagtgaaactcaaaaaaaaaaaaaaaaagaaagaaaaagaaaaagaaagaaggaaggaaggaaggaaagaaagaaagaagtgatacaacaagttacagcatctttgtttattatccactgtgagttgtattaccacactttacttggctctttggcaaactatattatctcttcagatcactagggctaggaaggcccactggtaacttgaaggagtaaatgtatcttctaaaaaatgcttacttccagggagattggatccacacaagtgaatacatatatagtccttagtgtatgctatgattattttactatgtcagtagcataaagattgctatattaataagcattaagtgcctgctgtgctagacagtgaggatgcaagtggccaccaaaatagcatggtccctgccctcctggagcttctttttttcttcttcagtgggggaagcagatactttgcttatgcaaaaataattataaaatttaaagttgtgccaagttcaatggaaaaaatataaggtgttctgagagagcataacaaaggatcctggttttaactggggcctaatggaagacctctattaggaaataacatttaaactaagaccagacagacctgtagaaattagcaaagcaaagggagggaggaaaaagcagctttcctggcaaaggaacaatttgtgtgaaggccctgagacagggaagggctggggttctgaccaccctccaagtggtgcaatggaatatagtgagagagggagaagacatgagaacttggatactatgcaaaggatttggtattttaattcaagagcagtatgatgctactgaggagcagctggacaattgtgtgatccaattaaaattttaggaagatgaacctcgctattgtggagaatgcatacacaagggttctgttggttcatgaagaggtcttaagaaaactatgagctgggtgcagtagctcaggcctgtagtcccatctacttagaagtctgaggcgggaggatcccttgagcccaaggagctggaagttacagtgagctatgattattccactgtactccagcctggatgacagagcgagatcctgcctcagaaacaaaaaccaaaaaacaaacaacaacaaaaacaacaacaacgaaaatctcagaaaactacaggccttattatcaagaaaatgacaggccttattattgagaaaactacttacatttttaaaagctgattttcaaaaaccagattgtgaattaagtgatgctgaataggggaaaaaaagactgataaaccagtgtatctctgaataacccactagatcagtgcttgtcaaactttaatgtgttttcaaatcaccctgatgttttgttaaaatgtaagtcatgtctcagtaggtctagaggagggcatttctgcatttctaacaagctccccggtgatgcctagaccattggtcctcacactttgagtagcaagtgattgggctatactctttattctaaattctaaatgtattctatcttctaatgcctatcagccctcttgctggtctggctaattatcaaacttgagcatttaaaactgggggttttcagagattaattgaagtgttaaagacatggaaatataggtcacatatggcttttcatctcttccggaaatatcctatatatccttacttcttttctacctacctaacctatgtgcctaccccttcacttatgttcaaggttctattatacttcaaaaggactctatgcaatcaaagtgatgtccaagacaaatatacagaaatagtatgaggctctaacactttacatctaatggagtggtttgcatcattaattgaggcttactctgtgccaggcactttacctgccttcttcatttaataggataggagcaggaactcttagaggttcatttcttgttcaaggatatacatctcatctctggcttatatcacagtggactcttttattcactatcctaatcattataattttgtttggtgacaacaattctaaatgcagaaaagttaaggctctttattctgtgactaaaggctttgtattttctaaagatttgtggagctttgctgccattatttcaataattttataaagatcctaggtggtaaataggcctggctttttttctttttgaaatcttctccgtcttcttcttcattagcagtgcaacttcttgtggcatatggtacccaagatcttgggaaaaggattgatcaagtaaagggaaacgatagagagagtgtgctctacaactgagatcatgctccttgtgaaagacagggtagggaaatttcttattgctccctggttcttaagaaatgagagctaacaatgacatccagttttaaaagaaataaaatctgaattgtacttttaaattttataagccagagttaaaccaatagattgtaactcctgctaatttgatagtagctccagataatgaggaagtgacagggaatgctaatttcatttggtaagagataaaactgaaattattaatgtctccacggaaatgctaaatgcctccttacaagtagggtccggctaattgtctgtcttccaacaagccagatttgttggtgtttttccagacaatgttgtgtagttttcggtttggttcgatcccctttcttgtgatcaaagaaagtgattcaaatgtttaatgagtcttgatttggattggagacttgcagaacggctagcctcacagccccaaggctggctttccctaaggtaggtttcctatgcaccgatactggcaaggcgctttggctggaaactctggaaggaagccaaaggaaagtgaagttcctggcgctagcgcgtgtcctgctcagagagcccggcgctagctcattcttcgtgcagttattggctgggactctgtgtgccgctgtcggccaatgaagacgctggagatcgggcccctgcccgtcccctttctgcgccccgggatgaggcagagactgaacagccggcgagcaaatcaacggcatccagaaagccatgtcggactcggcgcccagcgcccaagcgctaacccgctgaaagtttctcagcgaaatctcagggacgatctggaccccgctgagaggaactgcttttgagtgagatggtcccagaggcctggaggagcggactggtaagcaccgggagggtagtgggagttttgcttctgcttggtgccttgaacaaggcttccacggtcattcactatgagatcccggaggaaagagagaagggtttcgctgtgggcaacgtggtcgcgaaccttggtttggatctcggtagcctctcagcccgcaggttccgggtggtgtctggagctagccgaagattctttgaggtgaaccgggagaccggagagatgtttgtgaacgaccgtctggatcgagaggagctgtgtgggacactgccctcttgcactgtaactctggagttggtagtggagaacccgctggagctgttcagcgtggaagtggtgatccaggacatcaacgacaacaatcctgctttccctacccaggaaatgaaattggagattagcgaggccgtggctccggggacgcgctttccgctcgagagcgcgcacgatcccgatgtgggaagcaactctttacaaacctatgagctgagccgaaatgaatactttgcgcttcgcgtgcagacgcgggaggacagcaccaagtacgcggagctggtgttggagcgcgccctggaccgagaacgggagcctagtctccagttagtgctgacggcgttggacggagggaccccagctctctccgccagcctgcctattcacatcaaggtgctggacgcgaatgacaatgcgcctgtcttcaaccagtccttgtaccgggcgcgcgtcctggaggatgcaccctccggcacgcgcgtggtacaagtccttgcaacggatctggatgaaggccccaacggtgaaattatttactccttcggcagccacaaccgcgccggcgtgcggcaactattcgccttagaccttgtaaccgggatgctgacaatcaagggtcggctggacttcgaggacaccaaactccatgagatttacatccaggccaaagacaagggcgccaatcccgaaggagcacattgcaaagtgttggtggaggttgtggatgtgaatgacaacgccccggagatcacagtcacctccgtgtacagcccagtacccgaggatgcccctctggggactgtcatcgctttgctcagtgtgactgacctggatgctggcgagaacgggctggtgacctgcgaagttccaccgggtctccctttcagccttacttcttccctcaagaattacttcactttgaaaaccagtgcagacctggatcgggagactgtgccagaatacaacctcagcatcaccgcccgagacgccggaaccccttccctctcagcccttacaatagtgcgtgttcaagtgtccgacatcaatgacaaccctccacaatcttctcaatcttcctacgacgtttacattgaagaaaacaacctccccggggctccaatactaaacctaagtgtctgggaccccgacgccccgcagaatgctcggctttctttctttctcttggagcaaggagctgaaaccgggctagtgggtcgctatttcacaataaatcgtgacaatggcatagtgtcatccttagtgcccctagactatgaggatcggcgggaatttgaattaacagctcatatcagcgatgggggcaccccggtcctagccaccaacatcagcgtgaacatatttgtcactgatcgcaatgacaatgccccccaggtcctatatcctcggccaggtgggagctcggtggagatgctgcctcgaggtacctcagctggccacctagtgtcacgggtggtaggctgggacgcggatgcagggcacaatgcctggctctcctacagtctcttgggatcccctaaccagagcctttttgccatagggctgcacactggtcaaatcagtactgcccgtccagtccaagacacagattcacccaggcagactctcacggtcttgatcaaagacaatggggagccttcgctctccaccactgctaccctcactgtgtcagtaaccgaggactctcctgaagcccgagccgagttcccctctggctctgccccccgggagcagaaaaaaaatctcaccttttatctacttctttctctaatcctggtttctgtggggtttgtggtcacagtgttcggagtaatcatattcaaagtttacaagtggaagcagtctagagacctataccgagccccggtgagctcactgtaccgaacaccagggccctccttgcacgcggacgccgtgcggggaggcctgatgtcgccgcacctttaccatcaggtgtatctcaccacggactcccgccgcagcgacccgctgctgaagaaacctggtgcagccagtccactggccagccgccagaacacgctgcggagctgtgatccggtgttctataggcaggtgttgggtgcagagagcgcccctcccggacaggtaaggtttagcaagtcatgcttgaccctgttagtgcttttttattcctacatcatattgaggaaggaatggagctgtttttttagtgatgaagatgttttcctggtgatgcattcacactttcaactggcccttcctagatcaaagttagtgcctttgtgagatggtggcctgccagagtgtggtttgtggtcccatttcagggggaagatacttgactcatctgtggacctaattcacatcctcagcactcttttgctatcacaactaaccaatcttgctaagggatggttaagctaaaacacaagatctcagcgatcagagtttagcttggtatcatttacattaggaataagctgctggatacctctaaccagtggcagcttctaggaatacaaaaactacctcattcctccacctttcaagtgattgtgacatttgtattaaaactaatagctttttgataattttcctttgtttatacagatcgtgtacctcattctcagataattttttatgaatgaaatgaaattccaggcatcctttaaattttatttcaagcattctactggaaatgatgtgcaccctgcttacaaaatatttttaccttataacagtaatgcatgtttgctagaaaattcagaaaatacagaaaagtatttaaaaaattaaaactataatctccaaacccaaagataaccatttttaattataaaagtaataatttatttcaaaaataaatctaggcaacccaagaaaacataaagtagccagactcagtggtgtgcacctgtagttcttgctgctcagtgcctgaggtgggaggattgcttgagcccaggagttctgggctgtggtgcactatgctgatcaattgatcaatccactgtctgcactaagttcagcatgaatacagtgacctcttgggagggcaggaccatcaggttgcctaaagaggggtgaactggcccaggttggaagtggagaaggtcaaaactgctgtgctatccagtagtgggatgacatctgtgaatagccactgcactccagcctaggcaatatagggaaaccatgtctctttaacaataacaacaacaacaacaacaatcccagaaactacaaaaggagagtctttttggtgcctccagtgttagtccctgtccttccagccttatttttcttaagtatatgcacaatgtgaaaggtagataaattcatatccttagacaggtaaagcattcattaattcagggtggtatgcaaggatactatccaaggcatggtatccatgcaaggtgactgcaaggcctttgccctggagagaaccctatacatactctcaactgtaggagaaacactgttattttgttactcagtgcatcattgctatcaactcttggatttggcagttagtcaaatgaggttctaccatttaccaactaggagtctgtggccaagttactcaatctcctttctaagcctcttcctcatatgcaaaaagggaataataagtgttttataagattcatgcatgatataatgtatgcaaagtgtttagcatggtgcctggcatatcataactgttaaacaattattagccagctcctagcattttgggaggctgaggcaggcggattgcttgaggccagcagttcaagaccagcctgagcgacatagtgagatcctgtctctacaaaaaaaaaaaaaaatgtgttttcattagctgggtgtgttggcatgcacctgtggtaccagctacttgggaggctgaagtgggagaattgcttgagcctgggaggttgaagctacagtcagctgtgattgcaccactacacttcaaccatggcaatagagtgagaccctgtctcaaaaaaaaaaattatcagctattactataattatttttattagttcctcactcacctaaaatctcaaacacaccttagaaatacacatatgagaacaaccaaaaatgacaaagtagaagcacatatgaaaaggctaagaaagcatgaaagccagcaagaaataactgccgctcttctggtcagcctggaaagcaactggcattttccctagaacaatgttttcaaacttggttgcacattaaaatcacctagagaccttttaaaaattctgaaacccaggccacaccccgacaaatgaaagcacagtctctgggggtgggacataggcatcattttttgaaggtccccacttgatcctaatgtgcagacaaatttgaaaaccacagctttgggaggctgaggtgggtggatcataagatcaggagtttgagaccagcctggccaatatggtgaaaccccgtctctactaaaaatgcaaacattagctgggcatggtggcgcatacctgtagtcccagctactctagaggctgaggcggaagcatcagtgagggagaatcagtgaacccaggatgtggaagtttcagtgagcccagatcacaccactgcactccagcctgggcgacagagcgagactccacctcaaaaacaaaaagaaagaaagaaaaaagaaaagcagtactctggaacctaccaatccatcatttagcatatttgtgaagtaaagtgttattctggtatttgcagaaccagaatccagctttattgggccaggcccaatttttttaaaaaacatggtaaggtctcccagccttaaagtattacatagcatagctctaaaagatcactgtaggaagacataaaatggtatttcagtcatctaagggaaaaaccttcctaaagcactagcccctggacaactattatttaaacatctacagctgttcaatagatattgggttctttttggagggatgtgacaaaattcttgtataattagattgtgatgatgattgtatcagtttagtacatgtaaatacactgaaaaccattggattatacactttaaatatgtgatttgcatggtatgtgaattatgtctcagtaaaaatctagagatggggctgggctcagtggctcacgcctgtaatcccagtacttagggaggctgaggccagcggatcacctgaggccaggagttcaagaccggcctggccaacatggtgaaacttcatctctactaataatacaaaaatcaggccgggcctggtggctcacgcctgtaatcccagcactttgggaggcggaggcgggcggatcacgaggtcaggagtccaagaccagcctggccaacatggtgaaaccccgtctctactaaaaatacaaaaattcaccaggcgtggtggctgaggcaggagaatcgcttgatggtggaggttgcagtgagccgagatcgcgccactgcactccagcctgggtgaaagagcgaaactccatctcaaaaaaaaaaaaaaaaaaaaaatcagccagatgtggtggcaggtgcctgtagtcacagctacttgggaggttgaagcaggagaatcgctttatctcaggaagcagaggttgcagtgagccaagatcatgctgttgcattccagcctgggcaacaagaacaaaactcactccatctcaaaaaaaaaaaaaaaatatctagagatgggagaatcatatggctggcataaaaaggtcaagtcaaagatatgtaagattaaggctttacgatgctccagttctagtaaaacagaccaggtacttgttttggtgtgaaattgccaatataagtatagtactgtacatattagttgtttagcttaggtaagtcttttaatctctttaaactccagtttcctcatctataaaataaagagaatatctactttgcaaacttgttgtgagagtgaaaagtaatgcatataaagtccctgtatggagcaagtactcaataactatttgttgaactaaaaatgataatactgatattcaccatttattagcatccctatgtgccagacactgtaaacaattaaaagttatcattctggtacccagagtacagtatgagacagacatgcaaaaaaaaaaaaaaaaaaagataatggagatctgcatagcataagatgcagtgggaccaaacgggaaaaaacacctaaatgagcctggagaaaggaagaaatgatagaggtggtgatgcttgagctatgatctaaaggttgagtagtagcttgtcagacagtaaaggggaaaggacagggcagggaggggccattgcaagaaattccatgcagagggattatggtatttcattatcactgaaccttaaactgtgtgtgtggccgggtacggtggctcatgcctgtaatcctagcactttgggaggccaaggtgggcagatcacttgaggtcaggagtttgaaaccagcctggccaacatggtgaaacctcatctctattaaaaatacaaaaaattagccaggtgtggttgtgggtgcctgtaattccagctacttgagcagctacttgagaggtcgaggcaggagaattgcttgaacccgggaggcagaggttgcaatgagctggtgtcaggccactgcactccagcatgggcaacagagagagactccatctcaaaaaaaaagtgtgcgtgtaaaacagacagtctttgtaggagatgaggtgaagcaagtaggcaggagttagatcctgagttacctttgggccaagccaaggagtttttattttattccatatagatgacagtcactgcagaaatttgaactgatatgcatatatcatgaggtttttttgttttagaaatattattctgtcagtcataagtgaagggactggggacattgggactggaggcaaagagatcttatctctttgcaatagtttgaaagctattgcaatatttgaagagaagattgataaatgcttgaaccagcacagtggcagtacagatggagggagctgactacaataaaatcatcaggacttgttgattgacatgatataggaagtgagggacagggatgagtcaaggctgatccccctagatcctgactaaggaagctgggtggttgacagtgccattcacagagacagtgaattctggcataaacacctaataggtcaggctggtttacacctccatcattcccatgggagaaggtatagaggggtgtgtgtttgtgtgtgtgtgtgtgtgtgtaaaagaacacagaaagccagattcctctttttgacaccagaatattggttcccaccatagtcaaaaggatattcctgaggatcgaggcttggaaaaatattggggaaggataagaactccagttgttgctgctttttttggcagccagtgtaacctaggtaaggacttggttgaattaagaaatttcatgtccagatcaggatggatttttctatttctctgagctctggtgtgtttcccactcagattgcaggtcgtaggtacctacggtgtgaattgtgttgtgtttctgtgcttgtgcaagggagtagctaggttgctgggaggtctggatgagggtgggggtggggtgagatcaagtctccagctccaagaggtcccctggggctaagtgaaaagcttgctcttttgaaatggtcttcgttggtaattaacaaaagatcaagaataccttggtgtcagataaagggaatttgtaggcacaatgctgttggtagctgatctcaatcattcaaggaagctattaaatctatgaacattagcattctgccaggtaaagagatctggtccttagcacctcccagacacactgattctttactgttttgaaacatctccctctcctggcttcctccaccccgcttccatactgtccttgaaatcaatgaatggtaatttagtgtatctagtgtatcactagcaaatgtctgaataagaaaggtttggtttccgctgtgtctcctgttacaatgagaacatgtactgcataaatttaattggctacgttaatgtgtaagccttttctgcaaagagatggatccgtttctgaatattctgcagaagggcagagttttgagtatatggcagtggttctaattagcagttgctccaatacaatcagactgagacggaagctactcatttagaatactggttgatgacaacactggcttgaacaaagtgaccactctccaatggctactctccctctcagtgggccgcaggttgctagggctcaggctgtggctgttttccccgccgaaaaggggcggggtcagtcggtgtgttaggaaaaaaaatgtatatatatatatatgttgtctgcctccccacagagataacaacccgtggaaaaacatgccgttgagcgggaggaaggcgaaaagataggctgggttttttggggggtgggggagcgtggaggatagggtgggctttttcccctccaatgctgcgacgcattaaccctgctgctgttgggacgttctctgctcagcctattggctgagcccgggagccgctgtctgccaatcgggtggtgaaaggcagacaaatctaccccgccaccagcaaaaacggcgcgtaacccttgcggcgccggccgaaccgcgccagagctggcgcggggaaagggagataggtgtctccagctgctgtggctgtttggggcgggtcggcttcatccgcgtctcaggagcaagtagagaattagcgggcggcagcaatgctccgcaaggtgagaagctggacagaaatctggcggtgggctacccttttgttcctcttttaccacctgggttacgtttgtgggcagatccgctacccggtcccagaggagtcacaggaagggacttttgtagggaatgtcgctcaagatttcctgctggatacggacagtctgtcagctcgcaggctgcaggtcgctggagaggtgaaccaaagacacttccgtgtggatttggacagcggagccctgctcatcaagaacccaatcgaccgagaggcactgtgtgggctcagtgccagctgcatcgtgcccctggagtttgtcaccgaaggtcctttggaaatgtaccgagcagaggtagagatcgtagatgtgaatgatcacgccccccgttttccgcggcagcagctggacttggaaattggggaggcagctcctccaggacagcgtttcccgttggaaaaggctcaggatgcagatgtggggagcaattcgattagcagctataggctgagctccaatgaacactttgcactggatgtgaagaagcgcagcgacggcagcctggtcccagagctgctcctggagaagcctttggatcgagagaagcaatcggactaccgcctggtgctgactgctgtcgatggagggaacccgccgagatctggcaccgcagagctccgggtatccgtgctggacgtaaacgacaacgccccagccttccagcaatccagctacaggattagtgtgttggagagcgcaccagcgggcatggtgctcatccagctcaatgcctcagacccggacctgggtcccagtggtaacgtcaccttttatttcagtggtcatacccctgatcgtgtaagaaacctctttagcctgcaccccactactggaaagcttactcttttggggcccctagactttgagagtgagaattactatgaatttgatgtgcgggctcgcgatgggggttctccagccatggagcaacattgcagccttcgagtggatctgctggacgtaaatgacaatgccccttacatcacagtgacctcagagcttggaaccctccccgagagtgcagaacctggcactgtggtggcacttatcagtgtgcaggatccagactcagggtcaaacggagatgtgagcctccgcattcctgaccacttgccatttgccctcaagtctgccttcaggaaccagttctccctggtgactgctggacccttggatcgagaggccaaatctagctatgacatcatggtcactgcttctgatgctgggaaccctcctctcagtacccacagaactattttcctcaatatttcagatgtgaatgataatccaccctctttctttcagaggtcacatgaggtgtttgttcctgagaacaatcgcccaggggacctgctttgctcccttgcagcctctgacccagactctggcttgaatgcgcttatctcctactcactcctggagcccaggaatcgagatgtatcagcttcctctttcatctctctgaacccccagacaggagctgttcatgctactcgatcctttgactatgagcaaacccagacactgcagtttgaggtgcaggcccgggatcggggcaacccaccccttagcagcactgtaacagttcgtctatttgtgctggacctcaatgacaatgctccagctgtgctccgtcctcgggcccggcctggttccttatgtccccaagcactgcctccatcagttggtgctggccacctaatcacaaaggtgactgctgtggacttggattcaggttacaatgcttgggtttcctatcagctcctggaggccccagatcccagcctgtttgcagtctctcgatatgctggggaggtgcggacggctgttcctatcccagctgacctcccaccacagaagctggtcattgtggtaaaggatagtggtagtccaccactctctacctctgttactctcttagtgtccttagaggaagacactcatccagttgtcccagatcttcgagaatcttcagctccaagggaaggagaatctcgtctaaccctctacttggctgtgtccctagtggcaatttgctttgtctcctttggctcattcgtggcactactctctaagtgtcttcgtggggcagcctgtggagtcacatgctttcctgctggcacctgtgcctgtctcaccagatctcgaaggagggaggggcttcccccttccaatgggatcctccgaatccagctagggtcagatgaccctatcaagtttgttgatgtgggaggccactctcatggctgtacacccttggcttctgcacccactcggagtgatagcttcatgatggtgaagtcacccagtgcacctatggcaggggagcctgttcgcccaagctgcccaccctctgatcttctctatgggctagaggtgagacctttgcaggctcaacaaatgcttgagggttattctgatccaggcatatggctaggccatgtcctagagagtactggcctctcagtaagtgcccatagtgatgtcaccatttttgtaagaggtaactatgtggtagacgctgtgctttgtaactgtttcgtgaattaaccagagttgtcacagtttagcattgggggcgggtcatgcctatatctgagtaagaaatgaaagtaattggtgatcaagagccaggctgttgtggaagcatgatgatggaatgtgggagcacaggaggctacagtgcacagggtacagtgcaccaggcagtcacttggacaaaggtggctgttttctctactcttcctgaaagaggggatcagattctgaagtaccttaactctaggttaccatttcccaagggattgaggggaaataaaatctttgtctcccagtatctagtacactgtgaagggacctctctatttgaaacatagagacagcagaaagaggagagaactaaaggaatagagaggcacgcatcagagtggtggcatagatcttttggtctgggtcttaggactcatatcaagtccctactggggatttgaactagatgcggtaaattggaaggttggggcgggttggtcatcacctttggaaaaaacagtaagtgaaatcacttatgtcagaaaactggtttacagttggctgattcatagaaacagccaccctgtgcatctttaagttgagttctcctgaatttggtgaaaccatgaaacctagaagccaagccatccatgcttggcctctgaccaccctcctgggtgacctgattcagccccagaaatgttcccctacccaaaaactgtaacactcattccacatttggggtctggggtgtcagaaaagctaagtcccatgtcagctgacattgagatttccgcaaagcattgctggagagtcagggcaagactttacaaggttcttactaatcttttctctcaccttagcagcattcagcaggatgggggagggtgggggaatacatgggctttgcctctcccagaaggacaagattttgctggttcaagcaaagtggtggaagcttctgaagtcatgcaggaagttgctgggacagaacgctgaggagttttgtatcactttgtcttccctgttgagtaccatctgagctgtcaaactttgctgccaagggggctgaatcaacctgcagcacgaagtgagtggggaggtaggaagcttctgtgacacagatttgcagcctgtgttcccaaggtttccaggattgaggaaactccataattggttgagagcacacagactttttggccaatcagactcagagctgaggtgggagatctgctcttccagcccgcctctcctcctccagctccccagctccactcaaattcagctcccctcccccctgcccacccccgccactcggtgactaagaactgctgcaagcaggcaaacctccgagcagtttttaagaggctggaaggagacataagagacttcagctgctgcattccaagccctgggtctaccttggagacaggacagcacagacttactctccacaaagggacttctgggtcatggggcccaagacactcccacagctcgctgggaaatggcaagtgctgtgcatgttgtccttgtgctgctggggctgggtgtctgggcagcttcgttactcagtggtggaggagtctgagccggggacgctggtggggaatgttgctcaggatctgggcttaaagatgacagatctgttgagccggcggctgcaattgggctctgaggagaatgggcgctatttttccctgagcttgatgagtggtgccctggcagtgaatcaaaagattgaccgagaaagcctatgtggagccagcaccagctgcctgctgccagtgcaggtggtgactgaacaccccctggagctaatccgtgtagaggtagagatcctggatctcaatgacaactctcctagctttgccacccctgagcgagagatgcgcatctcagaatcagcagcatctggggcacgattcccactggacagtgcccaggatccggatgtgggcaccaatactgtgagcttttacactctaagccccaacagccacttctctctgaatgtgaagaccctaaaagatgggaagccattcccagagctggtgctagagcagcagctggatcgtgaagcccaggcaagacatcagctggtgcttactgctgtggatggggggaccccagcccgctcagggaccacccttatctctgtcatcgtgctggacatcaatgataatgctccaaccttccaatcctcagttctacgtgtgggaatcccagagaatgcacccattggtactctgctgctccgcctcaatgccactgatccagacgagggcaccaacggccaactagactattcttttggagaccacacatctgaggcagtgcggaacctctttggcctagaccctagcagtggggcaatccatgtgttgggtcccatagactttgaggagtcacgtttctatgaaattcatgcaagagcccgtgaccagggacagcctgccatggagggccactgtgtgattcaagtggatgtgggggatgtcaatgacaatgccccagaggtgctattggcctctttggccaaccctgtcctagagagcacaccagtgggcacagtagtggggttgtttaatgtgcgagaccgggactcaggtagaaatggtgaagtgagccttgatatctctccggacctgccatttcagattaagccttctgagaaccactactcgctgctaaccagccagcctttggaccgggaggccacatcccactatatcatcgagctgctggccagcgatgctggttcaccttccctacacaaacatctcaccatcaggctcaacatttcagatgtcaatgacaatgcaccccgcttcaaccagcagctttacactgcttacatcctagaaaaccggcctccgggctcccttctttgcactgtggctgcctcagatccagacactggggataatgcccgcctcacctactccattgtaggaaatcaggttcagggagccccagcctcctcctttgtgtatgtcaacccagaggatggacggatctttgcccagcgtacctttgactatgaattgctgcagatgctgcagattgtggtgggggttcgagactccggctctcccccattgcatgccaacacatctctgcatgtgtttgtcctagacgagaatgataatgccccagctgtgctgcacccacggccagactgggaacactcagccccccagcgtctccctcgctctgctcctcctggctccttggtcaccaaggtgacagccgtggatgctgatgcaggccacaatgcgtggctctcctactcactgttgccacagtccacagccccaggactgttcctcgtgtctacacacactggtgaggtgcgcacagcccgggccttactggaggatgactctgacacccagcaggtggtggtcctggtgagggacaatggtgacccttcactctcctccacagccacagtgctgctggttctggaggatgaggaccctgaggaaatgcccaaatccagtgacttcctcatacaccctcctgagcgttcagaccttaccctttacctcattgtggctctagcgaccgtcagtctcttatccctagtcaccttcacctttctgtcagcgaagtgccttcagggaaacgcagacggggacgggggtggagggcagtgctgcaggcgccaggactcaccctccccggacttctataagcagtccagccccaacctgcaggtgagctcggacggcacgctcaagtacatggaggtgacgctgcggcccacagactcgcagagccactgctacaggacgtgcttttcaccggcctcggacggcagtgacttcacttttctaagacccctcagcgttcagcagcccacagctctggcgctggagcctgacgccatccggtcccgctctaatacgctgcgggagcggagccaggtgaggggctcggcgccgccccgggcgacccctgggggcggcactggagaagccgcccgtcctcataagggattgaacttgcatccactcctctccggccggcttggtcgctggctgcgctccacccgattctcgggatcattggaccgtttgcgcgaaaccagagtggccgattaagggatggggctccgagcaccgggggtggtggcgactgtgggcgaggggaggtgggaccgacccccacccctacactcaaaaaaggccggggcctccttcgagcttccggtgaatttcgggcgatttccgcgggtgtcgggggtcccgggaggaggcagtcacagatccacccctgcagccagcctcctaggcgccggctccggcacgcttcgccggtctgtagatttcctcttcgatttctccccagctcccagcatctgtgacttcactgttaccctccctatccccgcatcacccaaccgcacctgtctgcgggacttaggtgtgcgcgcggggctcatgcgtgtcctccctgctggccacccccacggcccacacaagttgcacgggctcgccacgccccgccaacacgtgcgcggacgcacgcacgcactcctcgcacgtgggcttacgcgaataccagctttcactgccactcgctcgcggccagattcacaggcctgttccggtccactcgcagctcccctctgccgctccctccgccgggctcaggagtactcgtagctgattgtgcgcgcctgagggtcccagatcgcggccgcccaggaccaggcgaggactccggagcctcctctcacctctcccacctgcgccccgggctgggccgggtcgcctggggggcggcctgagcgaggcgcggggccaggagcgctggagcgactgccgctctaagtgccgggcgggcaggactctacgatccttgggccagaggtccggatggtcccgggactccgtctcaagggtcggcgacccctcaacccagaagcctcgagcaggcggacaggcagagctgcccagtggccgaggcgcggcagggctccgcgttgggcgagtgagtgagcctctataggacagcaggactgggactccagtggcaccagcggccccttcctcccgcaggaagtgaaagcctcgagcgccctggctctcaacccccagagatacaggcttttggcgccgtcgtgatcacaatgtgcccagcgatctagggtcagagatttggaggtgaccaaactatctgacactctaacaagtcctgtctcctctggcagatggaaagctataggctctgccagatgccagggtgcccttatgtgtgaggaaactacaatagtaaaaaacacaagtttctccaactccaggagcttttattcaaaatatatcaatgcctaactctgctcctaggactgtattttgaaacacccccaggtgattttgatagctgattgagagaaacttactatataactcctttgagaacctcatctcatttgctcttcccaccattgctgttggctaggtactaacatgcctctcttataacagcttcacagaggtcaagtgacttgctcaagttcacagagcaagtaagagagattctaacccctgtctaactccagaatgtgtgcttttaatttcttggcacttggaactttaaaagcttgaggacaggagaggggagttgcctctgctgggattttgcttctgctgggatggggcaagggtggggttccttcccttttaggaccttacatgtggggaaagtcttctgtggctcctcatttctgagcagtccccgcagcgcaaacttggccagttatccttttggagattgagttcccccagctccgtttcctcctatcacaatcactgcatttccatgtagattctgctgtgtctaagaatacagtggctgagggctggccatccctgtgcccttctccatggcagccccagaatggtgctggtgactcccgatacacctggaatgctaggtttctgggttctgctcatatcactgccacctgtgagccttgagtgagccactggcagttccggagcttccttctccctggagtaatctgagatactcacactctctgcttctgggagcaagtatgagtattaattaccagcccaccccagaaccagtgaggaggtggctctaggagtgctccatgagagtgtgtgatgggataacacaccccctggaaagaccagaagggactcaggaatgaagtggctggccagagccccacaccttcagctaggtgggagatggctacacatcagccccttgggagccctggagacttagttggccctgcttggaggctgtgggagctggatccctccccgctgcatcccttccatttttctccgtctcagacagagcagccttgttctcttctccttagtcacagaccattgtctggcacggagttctaggggtgagaagtgtcccgggacttggatgccccgcaaaggcccaatctggcatgactcctaaattaataatgtatttagctgtgggaagagattcttgcaagccaagggcccagagaagatgtccctgtgaatgtgtcactgcacaacctggcaccaaaagggttaccaagaacagcagccatcttgctgcagaggatgctttgttcccagctgaggagttgaataaattcattctagggctggtagaattctcattgaaaagcctcctttgccactttagggggctttgtctgcacctcttcccccagttccacagaagatgccttcagtccttgaattttggctcaggagttctgactctgggggcagggaggaaggggccatttctttaggaaaggagtctcagcttgctcactgtggtcagatgaaatgtgatttatctcttggtttctggtacctcagacctctgagacctgaggtgtattttgtctttggagatgagtccacccctgccccctcttagtccgttttcttctctgtgcccactcccctccttctctcccggcccatccctaggggctcgggtgacattctaacttctcacgggtactcagcccctttccctctgttttctccacagcaagccccgcccaacacggactggcgtttctctcaggcccagagacccggcaccagcgggtaggtgactgattctccagcccaccctcttctctgcggcattttctcagggatgacgtgggaggagatgggggagggcccagcatttgctacagatggcttctccctcagtttgagatcccagggaggtcttggtgtgcggggggctggcacacagaccccggaaggaagaggcgactgccctgactgttcaggaagctcaattcacatgcttgccccttccctcctcgccacgaccggcaccttttcctatcccctgagggcactgtggaaccaaaggatggtcttaagctggtctctgggtgaaagcgaggctttctatgcccatgtactgcctaaccccctcccctgagttgagctgggctccattatgacctggggctcaggcagaaaagcatttgaccggaggaggcggtccgcactcagcgcctcctccagagcctccagagccgaggctgactgcagcctggggagagtggaggcagcacagctggaggtggaactgaggaaggactgggcggggcatggagcaggcccccttctccggcccctcctcccactgtcctctgcccctacttgtcctgctctctgtctgtggggtctccgtgtctctgcccctttttcttgagtttccgtctttgccactttctcttacctctcagtccttccctcagtctctatctcgctttgcaatctctgcctctccctctcttctccatctctgtcttagcttccgtcttgattgctgcacctcagcctcagtccctttcatttgtctacttgcattgatctgtgccgcccactgtgcctgccatggcataagtgctcaataaatgtggagtgagtaactacacgggacccttagtctctttctccttctctatctctgcctccctgtccttgtcctggacctcttttctgtttctcctttcaccgtttcctagcgccttgtgttcttctatccccagcctctatgtttctctgtctctcactatttctgctttcctctctgttctttgtctctctttgtctctgtctctgtatatctttctttgtctctgtctctggtctctgtgcctgttgtctttttctgcctctttctctgttactctttctttatctctctttttcttttatcttgtcttttttctctgagcctctgtctctgtctctcatttttttgtgcttgtgggcaagccagcacacacaaccccccacccaccacccaccaacaccccgctctcttccttccctgcccctcacacactgagcctttgatcgcagctctccaccagacaccctcccatccaagcagccccagctgctcatttcaatctggtatgaattcctgctgagacaggaaccccctgcgggctgaaggggagggaaacttcagcagaaagaccttcagttggtctgagcagagtgggataggctctgcgccaggcctcccagttagaagtcaggagcctggaggagtctcagagcccagggagagaagcaggagcttgggccaccttaccctacctcctcaatggttgagtacttgctgtccacatttgccaagttgctacagatgctgagcttccaagagttatctttcccccatcctgcaaccaaccaaacccttgttgccacaaggacccaggagcccttggtgtatggcagagattccagcttctgggcatgcacagtcctgtcacccattttaggaacgcaaagcgcttcttagaaggcccctaaaaagcagcagatcaaaaggcttgggctgcccttgcccttcctttgaccccagctgttgtccttctccctgctggccttgccaaccttctcataagttatccattaagtcattaatgtattcattcgttcatttattcaacaaatatttatcgagcatctactatgagcagggccctgtgctaaacattgggctataggagtgaacaagtagatgtgatcccagaactcataggcttccagaccagcagaggagactgaaaatttgcaacaagtaacacttaaaaaaaaaaaaaaaggctgggcactgtggttcacgcctgtaatcccagcactttgggaggccaaggtgggtagatcacttgaggtcaggggtttgagaccagcctggcagccaacatggtgaaaccccatctcgattaaaaatacaaaaattagccaggcgtggtggcaggcacctgtaatcccagcgacttaggaggctgaggcagaactgcttgaacccggaaggcagaggttgcagtgagctgagatcacgaaaaaaaaataatctagccacaaatcacagtaagttctgagaggcagagaacaatgtgagtgtaatgggggggggaagatcagagaaggcttctaggaggaggtgacattgagaagttctaggccatttatgttccctctacctaccaccaccccaggccatacactggctttgaagcagaattcaccattgaacctggaagccccaccaactgcctctcatgtgtcctctggggtgagcaccttacccctgcctcaactcccattccatcaaatgagaggcttagtggcctggaatacatgtgggagctcttggagatatggaggagaaggtgcggaacctctctctctctcctctctctgcttccttagttaacttgtggaggatgcaacaaaccttttttttttttttttttagacagagtcttgctctgttgcccaagctggagtgcagtggtgcgatcttggctcactgcaacctctgcctgccaggttcaagcgattctcctgcctcagcctcccgagtagctgggacagcaggtgtgcaccaccacacccagctcatttttgtatttttagtagagatgggtttcgccacgttggccaggctggtttcaaactccccgacctcaactgatccacctgcttcagcttcccaaagtgctagaattacaggtgtgatcgcccccggccacaacaaacatttttgattcagcggctccaaagtgaaataagcgttaggatctagtccagtaacttcaacttctctccttcattcattcaacaaatggtcagtgagcactttctgttggccaggcagtgttctcgatgtgggaggcccctgccctcaaggagtttacagtgcactgaaggagacaaatattgaccaaataattacaaaaataaatgtgagactgaaactgtcataagtgctaggtagaattgtatctggtggtgtgggcgtataatagggatttgatttagggagcaggaggacatcctggaaatgaagttgtgctgagatctgaaagacaaatacaaattaaccagctaaagaaaagaaggaagagcattccagatggtcaggcataccagcttcaaagcagggctggtgttgagttcttcagtaaacttggttcaagatcaagccagctctgggtcacactgcctacacagaaggaagagcattccaaatgggaaaagcctatgcaaaagccttgtggtgaggcctcctgggatcaagggaatggcagggagttttctctttgctggcactggagtgaggggatgaagaggagaggttccttttatccagtctaaccctggttccagccttctgttgatgccctgcctcactccctccccaccatcttgcccactgccctccagcctggtctggtcagacacaccagcttcaaagcagggctagtattgagttcttcagtaaacttggttcaagttcaagtcagcactgggtcacactgcctagacagaaggaagaagacctggccaggtgtggtggctcacgcctgtaatcccagcactttgggaggctgaggtgggtggatcacctgaggtcaggagtttgagaccagcctggccaacatgatgaaaccccatctctagtaaaaatacaaaatattagccaggtgtggtggtgcacacctgtagtcccagctactcaggaggctgaggcaggggaatcgcttgaacccaggaggcggaggttgcagtgagctgagatcacaccactgcactccagtctgggtgacagagcgagactccatcaggaaagaaagaaagaaaaagagagagagggagggagggagggaaggaaggaaggaaggaaggaaggaaggaaggaaggaaggaaggaaggaaggaagaaaagaaagaaaaagggagaaaaaatgaagaagacttacattctgaagttcctgcttggcacatgcttctcctccccaccactatcccttctcaggtcatcctttgggtgtctgatcccaatagctgttgtctcaagctctgagcccagcaaaccatttcccccttcttaggctgtaacccaggccctgccctgcagctgtccccagcctctgcacaaagagtctccatttggtccctagactgttctctgatggctccacactaccatccctcctctgagagacagtatccctgctctctctcagtttgggcagtcattcaacaaacaaatagcaacttaatttttttccacttataaaatagtacatgctcattatagaaacatgaaaaatagaaaaaaaattaaaaggaaaaccacccatcattttacaatctagggagaaccaccaccaactacagtttaatatgaaacatttcaaatatgtacaaaagtagagagaatggtgtcatgaacctgtatgataccactatccagcttcaactaatgccttatcttgtttcacctatatccctacccttatcctgtccttggattcttttgaagcaaatctcagacatcatataatttcatcttggtctccaccatctttaacagatgacttttttttttttttttttttttggagacagagtctcactctcttgcccaggctgtggcacaatctcagctcactgcagccttcgcctcccgggttcaagcaattctcatgcttcagcctcctaagtagctaggattacaggtgtgcaccaccacacacagctaatattttgtattttcagtacaaacagggtttcgccatgttggccaggctggtcttgaactcctggcctcaagtgatccaccctcctcggcctcccaaaatgttgggattacaggtgtgagccaccttgcccggccagatgattctttcataaggtccacattttatatttgagtgagtgtctcttaagtatcttaatgctcttttaatgtaaaagacttcccctccatcttccatttttgcaatttatttgttgaatccctgccttttcatatatatctttctaaacttttctttgtgtaatcaaagaacatgcatgagcttcatttttatttttatttatttatttatttatttatttatttatttatttattgatacgtagccttgctctgtcacccaggctggactgcagtggcgcaatctcggctcactgcaagctccgcctcccaggttcacgccatgctcctgcctcagcctccagaatagctgggactacaggcgcccactaccacgcccggctaattattttgtatttttagtagagacggggtttcaccgtgttagccaggatggtctcgatctcctgacctcgtgatccgcccgcctcggcctcccaaagtgctgggattacaggcgtgagccaccgcgcctggccgagcttcattttaaaaaaatctcattcacctaaataagttgttcacaaacttgtcacactttcatgtgacactttattcacatattaagaactgttattcccagtcatacggtacatttcctactagttttttaaaaatagcaactgaggccatactgtccaacagaattatagcttttttcttctttgcagtgtatcatgagaatttccccatgtctttcaaaattcttcccaagtcatttgcagagtaactcctcttatgaatatacatattattttacagaataagtcctcatatgaatatacatattatttttctaatgctaatgggcttttgctacattagaaaacatacacattcatttacaattttttttttttgagacagtctcgctctgtctccaggctggggtgcagtggcgccatctcggctcactgcaagctccacctcctgggttcaagcaattctcctgcctcagcctcctgagtagctgggactacaggcacgcgccaccacgcccagctaatttttgtatttttagtagagacggggtttcaccatgttgaccaggatggtctcaatctcttgacctcgtgatccgcctgcctcagcctccctaagtgctgggattacaggtgggagccaccatccccagcctcatttacattttaacacaattaaattcagggtgttgtcagggtgacttcctagatttctcagttttttgagcatgatgtagggagtattttattatagtccagtctatgggatattcccttatacacacacacacacacacacacacacacacacacacacacacaccccaaactcaatagggcaagaaccatattcatcatctcttaaatcctaggtcctgtcacaggccactgcttggaaaatagttgactaaatgtagtccatttcttccatttttacttttcactattccccaaatcctggaagagtccctcatatctgctgctggggctccaaggcctccaagctgaagcccagtacgttgttgtgcataagatcataggccctggaatcatattaggctggctttcaggttgcaactctaccagttccagctgtgtgactctggtatagtctctcaacctctctgagccctgttttcatctgttggaaaatatagataatcacaacacttatctgcagggtgattccgaggataaaaaagacaaatatattacccagtcagcttagaataggaagctctcagtaaatggttaaaaaagaggtctctctccctctgctcatctcttacccagcttcacataattggcagcccacccacctgtttggccctcaaccttcaaccatttcccaggacgcctccttacactcctgatcatcatggttccaaccccactgttccactcagctttgttccctcaacaccactgctccctgtgacaggtcatcctcctaacctctggcatctggtcccgttgtctccctgacaacccgcatgctctcctccctgcaacccccgccgcttgcctgctctccctactttattcccattagcccccttcacctggggctgagaacacctggccttgaccctgcaccctcagccaggcccacagagctcagtcgggccggaagtaaggaccccagatattcagttgaggaatttaacattaatacaataatatagaatccaccagcagattttcataaatgttctgtgtgttcttttatccttttttttaatccaggattttatcaaggagcatagattgcatttggttgtcacgtctttcctctcctttaatctggagccagctcccagtctttttatttttttaatgacatggatatttttaaagagtccaggccagttgtactttaaaatgtccccgaacctggatttgctggctattctctgatggttagattcagattacacaccttggtaggaatacttcccgcagcatcacactgggactcatctaacgtcggcctgtcccactatcagtgatgccgagtttgttcgtgtggtaaaaacagtgtcccagatctctccattataaaaatatatttttataaagatattttaaaatatttgtgaaaatataagtaatctgtggatgatactttgagataggcagcaacccttcatgcaattttagtattccctgatgatccttgcctgtatctgtttttacatcagtgattacaaagcggtgatgttctgtcattccttctacatgtatttgctggtattcttctgaaaattacctggatgatttcttcagatttaaattcactgtcttttccttggggaagcctggactggctgagctgcctaaccctgactctctgtcttttttttttttttgacagggagtctagctctgttgccaggctggagtgcagtggcaaccttcacctcctgggttcaagcgattctcctgcctcagcctcccaagtagctgggattacaggcgtgtgccaccatgcccggttaattttttttttttaatatctattttagttgagacagggtttcaccatgttggtcagaatggtctcgatctcctgacctcgtggtctgcccgcccctgcctctcttcataccctctggtagcccctgacacagcccatggcaagtatcacaattgcaattactctattgtgtaattatttaaaatcagcctctcagtgcccaccatgagcaccgtaaagatggacagtttctatcatactcacagccacaaccccagcacctggctctgtgtctggtacatagaaattgctcaagaaagaattgttggaggggcgcggtggctcacgcctgtaattccagcactttgggaagcggaggcaggtggatcatgaggtcaggagttcgaaaccaacctggccaatatggtgaaaccccatctctactaaaaatacaaaaattcgctgggcatggtggcatgtgtgcacttgtcgtcccagctgctcaagaggctgaggcaggagaatcacttgaacctgggaggcagaggttgcagtgagccgagatcgcgccactgtactccagcctgggtgacagagcgagactccagctcaaaaaaaaaaaaaaaagaaaaaagaaaagaaataattattgaatcaatggaaacagaattacaactcttcccacttttgggaaggagaattgagattcctgctttccccttcaaccctagctttatgtttgttgtgatggtatagaggtcacacatggcagccttgtgtctgttcttaggctgagttcatctacttagggacggggaatcccagattgggcaaaaccaaaagcagggacagaccttggaaaaattgtaaagcagttcttggttgtgctcacccaccatgacaaaatatgcacacacacaacgcaacacacacacagacattttcatgccttcaaggcctaccctacagcctttcccatggtgccaaacccttcttcttaccttacagtcacttaactgtctctgctggtctcttcccactcatttaggcaacaaatatttattgaaaaacttctctgagccagatggtgccaaacagttacctaaagggcagactgtgtgtgtgccagggctgtttcccgccaacactcccctgcaaattgaaataatttcatccttggaaattcaaaaaaatcatgaaaattgtcactgtgggaaaattccaagtagagctgaaccttctaagaagcagagagttcttcttatggtttagtatttttttaaattatgaatcatttcatgttttttcaacactcggagtttctaaaagtctcacttaggtccaagtgctaggctttgtgctaggtgcttcagtaggaagcaggtggagtcgctgcctcacagaagccagtgtggtggaggaacagacaggcactacaacagctgcagtgtgactagtgccatgtggggcagccgctgggatgggagtacagtggaggcacctgcccagtctgagtggatctcctctgatatattttattcgtgtcatcatggcaaatgttgggggactggcattctagggaacaccatctgcccaggattcacagcaagagggaacttgagggataggaaagtgcaccttggaaaaggtttgatgatagagtgtttgagggcggggggtgggggttcttgtaaaataggaggggcaggttcttctatggccgtggattttactctgagggcttaggaagccattgaattttagaaatttcttctccctgctccagggtctcttggggcctcctacatctccccctaggtacctcctaggtccccactttttctctagctctggaacattctcttccatttcccaccttcacagtcctctggagaaggtctgatctccctcactatgacaggaagccaggctctctcatggtgggtgggggaatgcactatgttcaatgcattggaccagcctggccaacatggtgaaaccccgtctgtactaaaaatacaaaaattagcctggcacagtggcaggtgcctgtcatcccagctacttgggagactgaggcaggagaatcgcttgaacccaggaggtggatgttgcaatgagccaagatcgcgccactgcactccagcctggatgacagagtaagaccctgtctaaaacaaaaagaaaaaagcatcggaggcagcaaagagctggtttgagggactgacttgtgggattctggcttctgaaggattgtagaagtgcctcctaccttgctgagagaaacaggtcttgggcatggggtagggttagggtactaggtttgggagccctgggagaggacaggaggggcatgagctgtgccggcctgggagtctgtgctcaccatcctactctctccccagctcccaaaatggcgatgacaccggcacctggcccaacaaccagtttgacacagagatgctgcaagccatgatcttggcgtccgccagtggtaagtggtgtcagtgtgtgtatggaagagtgggagacctggggttctggggtgcatctcacagccaccatgcccacggactggatgtcaaacctgtgtagtttctccagatctttcggcaggtctgaaaggacccacaattccaaacataaagcctggaattgtggctaaggaacagcagaggggttgggggtcctgggatgcctggaggagagcgaacaaggaaaagactcatggagggaatagtggttacaagtctagctctggaatgggacagtgtagctcaggtcctagctctgctactatccttgggacttggatcgacttgctcaatctctctaaacctcagtttcctcagcctagaaagtggggacagggaccccaaagggttgttgtagagattaaatgagatgataccacaaagcatagagttctgggcctggcgcttggaagccctcaagcaatgaaagtgggtgtagaaatccccagccgagagaacacctcctctttatgcgaggctcctcttttgctgcccctaactccagagtaggattctggttttcccataaggttgactaagggcttcctttgtaatagagattcggctagtggtggttgtccctgaagagtcactagggcccagagcaggagaagaagaatatcatttgtccttaagagcacagcctaagctgggcgtggtggctcacgcctgtaatcccagcactttgggaagctgaggcaggaggatcatgaggtcaggagttcgaaaccggcctggccaacatagtgaaaccctgtctctactaaaaatacaaaaattagctgggcatggtggtgcgtgcctgtagtcccagctacttgggaggctgaggcaggagaatcgcttgaacctgggaggtggctgtggtgagcagaaaatcgcaccactgcactccagcctgggcaacagtctcgctctgtctcaaaaaaaaaaaaaaaaaaaaagagcacaggctttagaggcaggccaatctggattcaaatcctggcacctggcaccaccacttagcaatgagtccttaggtaagttattaaaccccctcggtttcacttactattaatgggcacagtattaacggatctcattgtggtgttaccagggccaaatgcaagtccctcagcacaggattggcagagagtaagggcacaatatattattatctttgctgacccaaacccgttttttactgggtagaaagcagaattagaataatgcctattaataaagactagcttctggagcagcaaatcctgggcttataaggaggctggcagaggatcaaggcattgccctatatcatgaactgatagccctgccctccagcatgtctggaggactggtgggtagagaaccaggtgaaatcacaagaagcactgtcatcacacctgggcacatactaaacaaactttaggggcctcctgtcaatgaatcctctcaatagctctgcaaggcaggtctgatttctcacactcgacagatgagagaaccgagaaggcacttgccccagggtcctcagttttgagctgccaagctgaggttctaacctggctcaactcctaagtttatgctctttctactatagggaccatggctgcctttggatccagcctcggcttctctattacctgagcaggatgagaggctgtcctcttcctcgagctctgctttattcttccagatcagggttgccagataaaatacaggatgcccagttacagttgaatgtcagataaacagcaagtactatttcagcataagtcagtctcaaatgttgcatgagacataatgtactaaaaaaaaaaatgctcattgtttacctgaaattcaaatttaactgggagccctgtacttttatttactaaatctggcaactctaccccagatgtctgtgaggttaagtggggccaggcctacagctgacggaaggacagagagagaggtggcagggactgctggcctcctgaggcagagctgtcccaggtctggtggggctatgattccagagaggccagagactgagtatgaaagtggcaggcggctgggtctgaggagatgccaagttggcctcttgagggaaataaacaggtatatttagctgttgtggccttgcgccctgaggccaggaagcagctttttagcctaaatccagatgttaaaaacagaaatgaaatcagtatttatggccccaaaccctccaagcaagtcatgcagctcgttcccctgtcaaggcctcccacctttggcccacacagggcctgaccctcgtctaagcctgcgccctggggaacggaccctgggggtggaggtggtgggtcaggccctgctctcactttcacacccgcttcctagccctgaaaccagagaggttcctgaagtccagcccagccaggcctgtggggctgctgagaggggttaagtaagagggagagtaaaaaccgacacttgggaggaggcttttaaaataaacatctgcggggagggatgctctcaaggaggctgcggtttgcagctcagccagctgtgttccagctaatcagcctccttgggctactctggagttgctgccttggccctgggatggggtaggttaagaggacagagggaggtcagggagctgggggctgagtttccctgagtagaggctggcacaggagagaaggcatcacccccacctcgtccaggccagaagatgtccagcttcttgaggctctcctaagtctgcctctcctgggaccaagagaaaatcccggtccttgaccaaggtgggccttggggggagtggggtgtagagggaggggcactggagaactgactctacagaaagtcaaagctggcaatccaacttcttcccctcagatttatagatgggaaaacaggcttgagccacgcagagacttgaccaagctcacacagttccttagtggcagagcagagcaaatattctctttcttttacattctggatttccatatcttctctccctcctggtccagcccaacctcagggcaccccccacgaggtgggcgggggatggctttgtcacttgcacccactcggggtgctactcagagatcttgggtgcacataggacgtgggtgggccgagcttctagctactccgtcaggcccttcctgtcattctgtctctgcctcccttctccctgcttctccgtgttcctcctcattcttttctgtgtgcagggagactacaccccccaccccgctctttctctggcgcctctgaggtcccccctctagcccctaaatcactctggaatcctggctctttgaagccagatctgggcccccctcccctaccccttccattcccaggctgggaaaggctgaagaggctgacggctggaggggagggggcggggcggtggcggatctggcttccttttggagttaattagggaaaacagagaaatgtcagcggaatgaaagggctgggggtgggggccagctggggtaggagaggaggaagtgggcagctgctccctcccactcaacccctctcccccgcccccagaaagctctcagctccggggatttgcgacatgaaatgggggctgtagaaacctgagcgctggtgcgtgaagagaaaaaccgaggcgcatcccggctctcccctcccgtgtgccctcctcctcttatgccggcttgaaaatatttcctgtctctctatttctcaatccctggttgatgtcccaggattactcagcctctccggctttagtcactctcgctacccgctcccagggtccagggtggaggcagagggaggctgggagagaagctctactgccagctgggcctgggctggcctgggcatccctgaggttttaactgtctcctaaccacagaggatctcagggcctccagcagcgagccccaatgagtcaaactcttgtttcctcctctcccacccccgacccagtcagggcaggtgaggggtagaggtgatggcatgctggatgtgacggtgttgatgatgtattgcacaggatgaagcaccatctcatttagtcctcacagcagccttcacagtgcgtacaaatcagctggcaattccgagaggctgcattctaaacaagttcctgggtgatgctgagccagggccagagtgtggacttctctgggccccagtttcttcttctgtacagtgggacgttggactggaggtgctgtctgatgtcacctagctgtggcactctgagcctgtgcctaaagtgtccctgagatgtctagtccccgagatcatcatctcctcagcttcatagagccgagctcttctccatcttctctctacctcccattcactcagaacagggataaggtccaagctgctggtggtgatggtgactgactgtcccttccagcatgcgcttaggtacacttgggcctgaatgcccctctaacaaatgctaccgggtatggccttggtccttctaacacttggttccctcatctgtaaaatgagggtcataccacatagctggctgggctgttatgtagaggttaaaagtgattgtgcatgtgaagcatccagcagagtgcctggcacacagtaggtgctcaaatgctgttttgaaatacaaaaattagctgggctagtggtgtgcacctgtaatctcagctactcaggaggttgaggcaggagaatcacttgagcccaggaggcagaggttgcagtgagccgggatcgcgccactgcactccaggctgggcgacagagcaggactccatcttaaaaaaaaaaaaaaaaaaatgctgttttgaaatggaggcttggaagagcactcttcacccccaccccacacacttactaacggaactaccgaatctctactcgtgccaggccttgcttggcaaaggctaggggcatgtaaagccatggtttcatggctgctgccctccaggagcccatggtctagtgtgggagtcagaggctcccttgagaaagccagggcaaggaactgagagcccgtgtcacagccctgagagaaataccagcgaatgtgttttgagcacttacatctaccaggcactattttacgtacctgacatacattttcttatttagcattcactaaaaccagaagaggtggttaccattatcatccccattttgcagatgagaaaactgaagtggcataaggaggttaggtagacttgcccaggatcacagtgagtaaggaaaggagctaggaatcaaacctagactttctcactccagagcctcttaacctctaccctcaactcttgtgaagagagactaccttggtgacccctatattcccagtgctcagcgtggtcaaggcccagggtgctgtataggcattcattaactgctggggatataagacagtgactgttgaggaccctaagtttagctcccacctgatcttcctctgtctctgcagaagctgctgatgggagctccaccctgggagggggtgccggcaccatgggattgagcgcccgctacggaccccagttcaccctgcagcacgtgcccgactaccgccagaatgtctacatcccaggcagcaatgccacactgaccaacgcagctggcaagcgggatggcaaggccccagcaggtggcaatggcaacaagaagaagtcgggcaagaaggagaagaagtaacatggaggccaggccaagagccacagggcggcctctccccaaccagcccagcttctccttacctgcacccaggcctcagagtttcagggctaacccccagaatactggtaggggccaaggccatgctccccttgggaaacagaaacaagtgcccagtcagcacctaccccttcccccccagggggttgaatatgcaaaagcagttccgctgggaacccccatccaatcaactgctgtacccatgggggtagtggggttactgtagacaccaagaaccatttgccacaccccgtttagttacagctgaactcctccatcttccaaatcaatcaggcccatccatcccatgcctccctcctccccaccccactccaacagttcctctttcccgagtaaggtggttggggtgttgaagtaccaagtaacctacaagcctcctagttctgaaaagttggaagggcatcatgacctcttggcctctcctttgattctcaatcttcccccaaagcatggtttggtgccagccccttcacctccttccagagcccaagatcaatgctcaagttttggaggacatgatcaccatccccatggtactgatgcttgctggatttagggagggcattttgctaccaagcctcttcccaacgccctggggaccagtcttctgttttgtttttcattgtttgacgtttccactgcatgccttgacttcccccacctcctcctcaaacaagagactccactgcatgttccaagacagtatggggtggtaagataaggaagggaagtgtgtggatgtggatggtgggggcatggacaaagcttgacacatcaagttatcaaggccttggaggaggctctgtatgtcctcaggggactgacaacatcctccagattccagccataaaccaataactaggctggacccttcccactacataatagggctcagcccaggcagccagctttgggctgagctaacaggaccaatggattaaactggcatttcagtccaaggaagctcgaagcaggtttaggaccaggtccccttgagaggtcagaggggcctctgtgggtgctgggtactccagaggtgccactggtggaagggtcagcggagccccagcaggaagggtgggccagccaggccattcttagtccctgggttggggaggcagggagctagggcagggaccaaatgaacagaaagtctcagcccaggatggggcttcttcaacagggcccctgccctcctgaagcctcagtccttcaccttgccaggtgccgtttctcttccgtgaaggccactgcccaggtccccagtgcgccccctagtggccatagcctggttaaagttccccagtgcctccttgtgcatagaccttcttctcccacccccttctgcccctgggtccccggccatccagcggggctgccagagaaccccagacctgcccttacagtagtgtagcgccccctccctctttcggctggtgtagaatagccagtagtgtagtgcggtgtgcttttacgtgatggcgggtgggcagcgggcggcgggctccgcgcagccgtctgtccttgatctgcccgcggcggcccgtgttgtgttttgtgctgtgtccacgcgctaaggcgaccccctcccccgtactgacttctcctataagcgcttctcttcgcatagtcacgtagctcccaccccaccctcttcctgtgtctcacgcaagttttatactctaatatttatatggctttttttcttcgacaaaaaaataataaaacgtttcttctgaaaagctgaacgtttctgtataagcgatggaagctcctggcatgtgtgcatgaagtgatgagctgaggtgggtgctggaagaagggcggaatcgggaggccactttgtgtcattgcgcgtctagatgtttccgaattgcgtgtgtgtgtgtgactgtgcaatatggttgtgtatgcttgcaatgccgttgtgcctatgagacagtgtgcgattgtgtgcctatggatctgtgtaccgtgtgccattgtgtgatcggtccgctgtgggggtggggatctgagtgcggcgtgtcagtgtgcagtggagtgtgcagtctaagcttgcggctgtctccaggcagaagaggagaccccggcgcgggcgggggcgggttggcgccgggcaaacgccttgggtagaggggagaggacgtttcgttagttcccgccccttcctgactaaaattgcctacccgaagcgccccggagggcttcacgggaggagggtagactctcctttgcccccgcacccccacccccgctgcctaggggttttgggaaagccgcgggagtgggagggaatgcgggaggtgattcttccaaagccaagtctgcagctcgagcctcagtttccccatctggaattcgccttcccgctgacatctccgtagcgaagcctaagaaattggagggctcatcctcttcttgcgggggtcaaggggactgaaaggacgtgcaggaaatgagatccatcgcagactcagctcccctccctccttcctgtcggtgcttttccactcactcgcctgctctcccatctccccgccccctccgcctgcctcctcgaagcactgtgggattccgaggttgctgcagccagagaagctgcagaaaaacacggagctgggggtgaagggggacttaaaaggggaactacccggaaggacccaagaacacaaagacagagccactgcggttatctggctggtcagcaagggtatgcggcttcctccgcgctgcggaggctcccagagccaggtcacccattctgccagctcaagtctgttgtcatgggaaccaaaccttccaacttaagaatctgggggcgactttctagcgtgggaggaagggtggtgtgcacggttgctgagatggaagcagggttttgttactcagagccaggctgcggaggggcggggtgccgggcgcctgggttctattccaggcacagcagcagactggcagagcgcgtgagcagctgtggtttgtcccctaattggtatgtgtgcctataaagctctgaaccagaaaggcgtggcctccggggggacgggagggaggcggcaggcaacccatccccacacctcaggccatactgaggaggcagctgcccaggctccagggctatttaaaaggcttttatttccagttccagagcccgcccgaatgggtttgtggtcctctccaggcctctccctgtctatcctgggcctgctcattgctggtctggcttttttgtgcaggtcataacg

SEQ ID NO: 448 - DNA, 133081 bp, Homo sapiens
  source 1..133081: mol_type = genomic DNA
acatcagtggagagacgagtacctctaaggatcctgtcaggacagtcctgcattttgctcaaatgctgtctagagatccctgttttctcaattacactagaatagagtaggatgaagatttgaattgcatactaggatgaagacttgaattgaattgcataatgaaaagaatcagccaatccattatccagtttcttatgaattcacagcccagtaggatctctgcagatttctgccttctgtagaaaatgggttgcttctatagctgattgctgcagccaagacaaacaacgatttctttctttttttctcacaagactgggagtgagaatatttggattccgacattgttctactactatataatcaataatcaggaacaaggcaaggcaattccctctttctttctttctttctttcttcttcttttttttttttttttttttttggcagagttttgctcttgttgtccaggctggagtgcaatggtgtgatctcggctcaccacaacctccacctcccgggttcaagcgattttcctgcctcagcctcctgagtagctgggattacaggcgcgcgccaccacgcccggataattttgtatttttagtagagacggggtttctccatgttggtcaggctggtctcaagctcccgacctcaggtgatccgcccgcctcggcctcacaaagtgtgggattacaggcgtgagcaacagcacctggccccccctctcattttttaaacggttaaaatgaaggtgttagaccgtctctaaggttctatacaatcaaaaatttattaaaataggtctatatattttacaacaattttgactttctgaatcttgcatcatggtgtctagaacatatgtgttcaattaatactgaattaattaaaatttatatacactgatgtaaatattttctaagtaaaatctttcatatgtatttaaataaaatttacctttttgccttcaataactgattttcccatgtgcaataacgtgtgagtcagtgcccaaaagagtcacttgaaagttgcaaggcaaagcagttttttaaaaattatctaagattatcaaacaccggtccatgaacactgttgcattaattcagtgtcttaaaatggatttttaattatcagggatatctagagcaaagaaatctaacagggaaattttgaaagatgaaacaattttctatgaaatcagtgtattgtgtgcatcaatgtggtgcagtaacttagtaaggactcacagcgccgctgttcaccaaccagggaaaaatggtgcgagagatcccacagaaaccaccgagttttacagcacagagaaacgacagattgcgataagccctcttccaggctgcactaaactcaagcctctatcctgctggattctgagctccccttcctaagacagaggggtccacccggatacacccgcattctgaagcacttcccgagatcggcgcctaagcaagagaagcaggacgactatggcggctcagccgaggggcggggactacagaggattcttcctgctctccatcctcctggggaccccctgggaagcctgggcaggacgtattctctactccgtgtcggaggagacggacaaagggtcctttgtgggagacatcgccaaggacctggggctggagccccgggagctggcggagcgcggagtccgcatcatctccagaggtaggacgcagcttttcgccctgaaccagcgcagcggcagcttggtcactgcgggcaggatagaccgggaagagatctgcgctcagagtgcgcggtgtctggtaaactttaacatcctgatggaagataaaatgaatctttaccctatagacgtggaaataatagatattaatgacaacgttccaagattcttgacggaagaaataaatgtaaaaataatggagaatacagctcctggggttcggtttccgttaagcgaggctggggatccagatgtgggcacgaactccctccagagttaccagctcagccccaatcgccacttctccctggctgtgcaaagtggagacgatgaaactaagtacccggaactggtgctggagcgggtgctggaccgggaggaagagcgggttcaccacctggtcctcacagcctctgatggcggcgacccgccccgatccagcaccgcccacatccaggtgacagtggtggatgtgaatgaccacacgcctgtcttctctctgcctcagtaccaagtaactgtccccgagaatgtgccagtgggtacaagactgctcacggtacatgctatcgacctggacgagggagtcaatggggaagtgacatattcttttcggaaaataactcctaaacttccaaagatgtttcatctgaactcgcttacaggagaaatatcaactttagaaggattagattatgaagaaactgccttctatgaaatggaggttcaggctcaagatggtcctggtagtctgacaaaggcaaaagtactgatcacagttttagatgtaaatgataatgctccagaagtgactatgacgtctttaagtagctcaatccctgaagacacacctcttgggacagtcattgctcttttctacctacaagacagagattctggaaagaatggtgaggtgacctgcaccattccagaaaacctaccttttaaattagaaaaatcaatagataattattatagattggtcacaaccaaaaacttggaccgggaaacactctctttgtataacatcacactgaaagccacagatggtggaactcctcccttgtccagggaaactcacatattcatgcaggtggcagacaccaacgataacccacccaccttcccccactcatcctactcagtctacatcgctgagaacaaccccagaggggcctccattttcttagtgactgcacaggaccacgacagtgaggataatgcccagatcacttattccttggccgaagacaccatccagggggctccagtgtcctcctatgtctccataaactctgacactggagtcctgtacgcgctgcaatcctttgattatgagcagttgagagaactacaactaagagtgactgcacatgacagcggggacccgcctctcagcagcaacatgtcactgagcctgttcgtgctggaccagaatgacaacccgcccgagatcctgtacccggccctccccacagatggttctactggcatggagctggcaccccgctccgcagagcccggctacctggtgaccaaggtggtggcggtggacaaagattcaggccagaacgcctggctgtcatacctcctgcttaaggccagcgagccaggactctttgcggttgggctgtacacgggcgaggtgcgcacggctcgggccctgctggacagagatgccctcaagcagagcctcgtggtggccgtccaggaccacggtcagcctcctctgtcagccaccgtcacactcaccgtggctgtggctgacagcatccccgaagtcttggccgacctgggcagccttgagccctccgacggtccttacaactatgacctcacgttgtacctggtggtggcggtggccacagtctcctgcgtcttcctagccttcgtcctcgtactgctggcgctcaggctgcggcgctggcacaagtcacgcctgctgcaggcttcagaaggtggcttggcgaacgtgcccacctcgcactttgtgggcatggacggggtgcaggctttcctgcagacctattcccatgaggtctccctcaccgcggactctcggaagagtcacctgatcttcccccagcccaactatgtagacatgctcatcagccaggagagctgtgagaaaaatgattctttgctaacatccgtagattttcaggaatgtaaagaaaacctgccaagtattcaggtgagcccagcccttcctttatttccatgaggaatttatttgcatgatatttctctattattttgcaaaacaaatgttttgaaaatagggatttaaaaaactttatagaggtaaaaatgagtttaccagtttccttcagtggtgacactttaatatagaacacataggatatagtatttctttagtgaaagcctatggacaagattatgaatatgtggactatcacattttataatttccacctactttccaatctatgttccaacctactttcttaactcatatattttatacattggaatgaatcgagtctttcatattgcacaaggttagcaggaataaaacacacctcagctgtcttctcaggattctctttagcattcaaatatgtaaaaggttctgaaagatttcttccatgtgaagatttttttctgtggctgattctgcctccatgtacctcagcttggtggtcctaaaaaatcttgattgcttcttgacctatttacagtataatcatttattaatggggtggtagtagaaggttggatttatgcctaaagaatgaaatgtgtgtgtatcacacttcactaagatctatatcaaagacagacatcaagtctaatgccacactaaaggccatcggacaaaaccaataaaatatgtcaaataaaatgtcattttaagtgttgtaattggcatttgtgacataggcaattacatgttttaacagagaattccagtatgttgttttagtggtacagccagatgaagtgtgtctgtgggctatcaaagtgggagattggggatactggctttgtttcaactgtctcacgtactcaaaccttagaccatcttatgtacacagatcctagaccagtagttgattttatttattaggtctactgaaaaattcagttggaaataacccaatctgggattaactacttccatattcttttgtataacattttagtaaagctcagtatatcaagtgattgtcatccagaaggggtggatgacaaggtaatcttgattccagagacctttgagtattaattaaaaacacacttttagccaggtatggtgttgcaagctgtagcccacctgcatgggaggctgaggcaagaggacagcttgaacccaagaattggaggcccacctagataatataacaagactctgtctcttcaaaaaaagactctttttagactagtgttgtatttggtagtattttgcacatgatagactctgtacaatagtgtgggggatacattttttttttttgacatggagtctcgctctgtcacccaggctggatacattttacaagttctgcagtgttcacatttcagatgtacaatcacttggggtagaagacaatgttgctgacaccaacaatgttactgagggaagatcctatggcagaactacggttataaggtattttgtaaaagaaaatctcctgaccaaaatttattagatgcataaaattgtttttaagcaatggagagacataatcactaaactcagtgagctattgcaatcaaactttccagggattgtttccttcaattcagaggtcaccaaggaatgtaaaataagtgcagaggtaggaagcagtgcttcagtgcagcagatctcagtgactttgtgttttgaggctatgtattatccccctgataactttgaagatgaatgttgtatttcataaccagtaaaataattgtgtaatgaggagaggagtaggctactgcctgtgatcatcgaaatgagaatcacataatattcctgtaatgaaatcactgaaactattgggaagggggtgtatttgaagataagtataaattgcaccttctaaaaggcaattttggtattactgatactctccggaaaaagttgaaataaatcaacttggaggtacttagaaaagtggagaaaatgttaggaacaatgaaagaaagataaaatgtatccagtatatttctaatgagtaagtatggaaaattactgtactctgagacggtttaggccaagtctgtgttatggctatctttatatagatagtgcatgtttgaagattggggaaagcttatgtcaataaatgtttatgtacttaatctacatgatttgcctaaaaatcctcaaagttgggatgaaggcattcctaagagtacatttttagacgtcattaaatatacagacgtatccacgtagtttttgttctttcagttaggcacacaattataattattgcactggttaacttgaagcagcagaggctgtagtttcctagtgctgactctgggcgccgctgttggccaaagtggagagcttggcgctccagatctcctcgcgcagccgcagcgcgctttccagggcagccccagctcagactccccagcgccagcctttacaccgcttcctcctcggaaaaagaagaattttttcttgaactggaactgcaactaaagtccgttcggagatccaaaaatctgcaatacagaggttatttgtaacccggcgtctccaggctggtgagcaagctgaggagagcaagagggatggggagcggcgccggggagctgggccgggctgagaggctgccagtgctctttctcttcctgctgtctttgttctgcccggcgctctgtgagcagatccgctacaggattcccgaggaaatgcccaagggctccgtagtggggaacctcgccacggacctggggttcagcgtccaggagttaccgactcgaaaactgcgcgtcagttcggagaagccttacttcaccgtgagcgcagagagcggggagttgcttgtgagcagcaggctagacagggaggagatatgcgggaagaagccagcttgtgctctggaatttgaggctgttgctgaaaatccactgaacttttatcacgtgaatgtggagatcgaggacattaatgaccacacgccaaaattcacgcaaaattcctttgagctgcaaataagtgagtctgcacagcctggcacacgatttatattaggatctgcccatgatgcggatattggtagcaacacactgcagaattaccaactcagtcccagtgatcatttctcactgataaataaagagaaatcagatggcagtaaataccctgagatggtattgaagacacctttggacagagaaaagcagaaatcctaccacttgactttgactgccttggactttggagctccacccctaagcagcactgcacagatacacgttctagtgactgatgccaatgataatgctccagtgttcagtcaagacgtatacagggtgagcctttcagaaaacgtgtacccggggaccacggtgctacaggtgactgccacggaccaggatgagggtgtcaatgccgagattactttctctttcagtgaagctagccagatcacccaatttgacctgaactctaacaccggggaaattactgttttaaatacattagattttgaagaagtcaaagaatattccatagttttggaagcaagggacggtggaggaatgattgcgcaatgcacagtggaggtagaagtcatagatgaaaatgacaacgccccagaagtgatattccagtctctacccaacctaattatggaggacgccgagctgggaacacatattgctttgctcaaagtccgtgacaaggattccagacacaatggagaagtgacttgtaaattggaaggtgatgttccatttaaaatattaacttcttcaagaaacacgtataaattagtgacagatgctgttctagaccgcgagcagaatccagagtacaatataaccgttacggcaacagatcggggcaagcctcccctctcctccagttccagcatcaccctgcacattggtgatgtaaatgacaacgctccggttttctcacagtcttcctatatagtccacgtggccgagaacaacccgcctggagcctctatttcacaagtcagggcttctgatccggacttggggcccaacggccaagtctcttactgcatcatggccagtgacctggagcagcgggagctgtcatcctacgtgtccataagcgcggagagcggggtggtgttcgcgcagcgcgccttcgaccacgagcagctgcgcgccttcgaactcacactgcaggcccgcgaccagggctcgccagcgctcagcgcgaacgtgagcctgcgcgtgttagtggacgaccgcaacgacaatgcgccacgggtgctgtaccccgcgctgggtcccgacggctctgcgctcttcgatatggtgccgcacgctgcagagcctggctacttggtgaccaaggtagtggcggtggacgcagactcaggacacaacgcctggctgtcctaccacgtgctgcaggctagcgagcccgggctcttcagcctggggctgcgcacgggcgaagtgcgcacagcgcgtgccttaggcgacagggacgccgtccgccagcgccttctggtcgccgtgcgtgacggtggacagccaccactctcggccactgccacgttgcacctggtcttcgccgacagcttgcaggaggtgctgccggatatcactgaccgccccgacccctctgacctccaggctgagctgcagttttacctagtggtggccttggccttgatctcagtgctcttcctcgtggccatgattctggccattgccttgcgcctgcgacgctcctccagccccgcctcctggagctgcttccagcctggtctctgtgttaaatccgaatccgtggttccccccaactacagcgaggggactttgccttattcctacaatctatgtgttgcacatacaggaaagacggagtttaatttcctaaaatgtagtgagcagttgagttcaggacaagacatactttgcggtgattcatctggggccttatttccactttgtaattccagtgaattgacttcccatcaggtgagtttcctttaagtataatttaatgctcattgcctacccatttctccatattcacaagaaaatatacatatttgcaggaaaatatataatttttagatgtcatggatcattttaggaaagttgtagtcagttaaaaagctgtcatatcattctacaaaggaggagtaaagtaggagcaattgtgtggcccaacatttgtttgttttttagccaagcttagatttataaagcaatgagggtgtggttttaaccacaaagtgaaagtgttagacagttgttggctctctcctaaaaagtgaatgagatttttcctatacattttccttcttgttgactaatatatgatgaatacttttttcagcttggatataccataaatataaaaataataaagccaaagaatttaagctaaaattcaacacttttcttaactaatttaactggtatggtctccatagtagtccactgttttgtttcctgtgttaacttcccttttgtttcaaaagctcttagaataaggagtcaactggatttttatgtccatggaccccttgtgattatatgcagtgtacgctgtgtgtgcgtgtgtgtgtgtgtgtgtgtgagagagatccttttacttagaaaaaggtctactatgctcattagaagatcaaaagcagattctccttacttgtaacataggagtttcaggattaatctgtattcaagctcattctatatccttcatcaaagaaaagacaatgttttgtgtctgttgtccctctcacacacagccctaatatataatgtgtaactgccttatctgcagccctaaactaatatagctagaggtcttctaatcattctcctacctctaggaaagaaatatagtcttgaaaactgccaatctggtgtgcatacaaaatatatacaaaataccaaggaacattatatgagccttttgctaggtatatctaagcaactgcttcagttaatggccactttacaaattgctgaaagaaggaaacgtctttcgattcttttttttttctttttttttttttgagacagagtctctgtctgttactcaggctgtagtgcagtggcacaatgatagctccctccagcctcaaactcctgggctcaagcattccttctgcatcagcctcctgactagctggaactcaggctcatgccaccagacctggctaatttttctgttttcagtagagaaaatattttctttcactaatttaactggtatggtttccattgtctacccagttttccatatgcataagaaaatatattcacaggaaaatataaagttttcagatttcatgagtggttttaagaaagttttagtcagtgaaaaaactatcataccagtcttcaaaggaagggtgaaataagttcatctgctacgttgcccaggctggtcttgaagggaaacagacttttttgtagtcatacttatcctttggcttcttagtaagtattatatagtcattactttttgcagttttttagatcaaagtgttaatgtaggtaaagttaattttagaatatatgtaaaagtcaagtctgctttaaatttaatcatctctttggtgaaagggatgggatggagctttgctttttatcatatattcatctgtacctttcaagtattcaaatagaaaaatataaacaatgtaaataaaatagcaaaacaatgtaatatctcataaaactgcaatggtaaaagcatttatcctattgaaattccacaatttttatttgaaaatattatcgacatgtaattcaagtggcatttagaagaataatttaaaagcaacaactctatagaaagcttgtaaaatgattaagtagtttaaaccaaataaaacaatttctgagtcagtcatctccagtaggtctattttagtctcaagataaattcatttctggtgacaactgaagttcttagttatttgttagtatatattggagacatttacaataaagcttagagcacaatgggaaatgaaagtatcatgttttttttaagaccaaatgtattgcagaaatgtgagtaatttaatccgatgctacaatctgatcattctgatctaatctgatcatttaataacactaaataaaaccttcatctcacattctttggctgtttcttttaaaatatgggtttacggataaatcaaataaattcaaaacaaagtaataagcaaatgatttttttttctcagtaatctagtagagtattacatttagaagtaatctgtatctcagtgcagtaactatttaggactgtaagcgccgctgttcacctactggaagacaaatgcaaccgaaaacactcagatctcacacctcacgaagacccgcagatgccacaaactaactgctggactgcagcgaaacccgacccctgtttggaggcactccaggtttccggaggattgtcatctccatagctgcggcaagaaactaaataagacccatttatgcacagtgaagattctgagaggattctgcagcaaaacaacaatggccgctccacagagtcgccccagacgcggcgagctgatcctgctgtgcgcgctgctgggaacgctgtgggaaatcgggaggggacagattcgctactctgtgccagaagagacggacaaaggctccttcgtgggtaatatctccaaggacctggggctggacccccggaagctggcgaagcacggagtccgtatcgtctccagaggtaggacgcagctctttgctctgaacccgcgcagcggcagcttgatcaccgcgggcaggatagatcgggaggagctctgcgctcagagcccgcggtgtctgataaatattaacaccctggttgaggataaaggaaaactctttggggtagaaatagaaataattgatattaacgataataacccaaaattccaggtcgaagatctagaagtaaaaattaacgaaatcgcggttcctggagcacgttatccactcccagaagctgttgacccggatgtgggcgtgaactccctccagagctaccagctcagccccaatcaccacttctccctggacgtgcagactggagacaatggagccataaacccagagctggtgctggagcgcgccctggacagggaggaagaggctgctcaccacctggtcctcacggcctcggatggcggcaagccgcctcgctctagcacagtgcgcatccacgtgacagtgttggatacaaatgacaatgccccggtttttcctcacccgatttaccgagtgaaagtccttgagaacatgcccccaggcacgcggctgcttactgtaacagccagcgacccggatgagggaatcaacggaaaagtggcatacaaattccggaaaattaatgaaaaacaaactccgttattccagcttaatgaaaatactggggaaatatcaatagcaaaaagtctagattatgaagaatgttcattttatgaaatggaaatacaagccgaagatgtgggggcacttctggggaggaccaaattgctcatttcggtggaagatgtaaatgacaatagaccagaagtgatcattacgtctttgtttagcccagtgttagaaaattctcttcccgggacagtaattgccttcttgagtgtgcatgaccaagactctggaaagaatggtcaagttgtctgttacacacgtgataatttaccttttaaattagaaaagtcaataggtaattattatagattagtgacaaggaaatatttggaccgagaaaatgtctctatctacaatatcacagtgatggcctcagatctaggaacaccacctctgtccactgaaactcaaatcgctctgcacgtggcagacattaacgacaaccctcctactttccctcatgcctcctactcagcgtatatcctagagaacaacctgagaggagcctccatcttttccttgactgcacacgaccccgacagccaggagaatgcccaggtcacttactctgtgaccgaggacacgctgcagggggcgcccctgtcctcgtatatctccatcaactctgacaccggtgtcctgtatgcgctgcaatctttcgactatgagcagatccgagacctgcagctactggtaacagccagcgacagcggggacccgcccctcagcagcaacatgtcactgagcctgttcgtgctggaccagaatgacaacgcgcccgagatcctgtaccccgccctccccacagacggttccactggcgtggagctggcgccccgctccgcagagcgtggctacctggtgaccaaggtggtggcggtggacagagactcgggccagaacgcctggctgtcctaccgcctgctcaaggccagcgagccgggactcttctcggtgggtctgcacacgggcgaggtgcgcacggcgcgagccctgctggacagagatgcgctcaagcagagcctcgtggtggccgtccaggaccatggccagccccctctctccgccactgtcacgctcaccgtagccgtggctgacagcatccccgaagtcctgaccgagttgggcagtctgaagccttcggtcgacccgaacgattcgagccttacactctatctcgtggtggcagtggctgccatctcctgtgtcttcctcgcctttgtcgctgtgcttctggggctcaggctgaggcgctggcacaagtcacgcctgctccaggattccggtggcagattggtaggcgtgcctgcctcacattttgtgggtgttgaggaggtacaggctttcctgcagacctattcccaggaagtctccctcaccgccgactcgcggaagagtcacctgatctttccccagcccaactacgcagacatgctcatcagtcaggagggctgtgagaaaaatgattctttgttaacatccgtagattttcatgaatataagaatgaagctgatcatggtcaggtgagtttagttctttgcttgcttttaatttccagatgaattttatttggcataaattatgttttgaaaaacattgtgaagatagttgaaaataatttttaaggtgtatcacagagttttgggtttattttggtggtgttactataaaattgaactctaatagtcataggttattgtttcatttgcttttaaacgacttggaaaagattgttcaaccattttaagccttccagtattttattcctattatcactcattcacttaagaagtagctacccgtccatactggtaattttgctattgtttgtgtgtgtgtgtgtgtgtgtgtgtgtgtgtgtgtgtgtgtgtgtgtgtatcccaaactagaacttcagaaaattatcaagaagtctaaagccttgttattagcttagcaaaagtaaaatatatctcagaatttttagggttatgtttagcatttgaacctgtaactaggctcttgtagatttcttcactttaaacctcttttctgagccctgtttctgtaccagtgcccttcaaaactttaatacttcttaccatccttcaaaacatgaacaaactttaaagatggatcttggtgggagatgagactggttactaaatattaagtatgtgagtcagtggtcacctgggctccatgcccatggagacatgaaatctaaagcctagaatgtccattgctcccccaaacaaaaaacaaaagcaaaaacattagatctgaattaaaatgtaattttaaactgttgaaagtgacttttgtaaaatatgtaagaacatatttcaatacaattccaattagctgtttcggttgtgcattgatgtgaagtggtgagaatgttgatattaagaaccaatgtttcaggtacacaagttctaaataagctgatcaattcaattaaagttattcagtcttggctggacacagtgcctcatgtctgaaatcccagcactttgggaggctggggcaggaggaccgcttgagccccgggggtttgaaactgcagtgagctatgatcatgccactgcactccagcctaggtggcagaactagaccctgtctctaaaaaaactattattaggccgggtgcggtggctcacgcctgtaatcccagcactttgggagactgaggtgggtggatcacctgaggtcaggagttcaagatcagcctggcaaacatggtgaaaccccgtctctactaaaaactacaaaaattagccaggcatggtggcatgcgcctgtggtcccagctactcgggaggctgaggcagaagaatcacttgaacccgggaggtggaggttgcagtgagcctcgatcctgtcactgcactccagcctgggcaacagggtgagactccgtctcaaaaaaaaaaaaaactaatattaatagtaaaaactcggtataggctatccattattgtattcctgcataccttcttgtagcatttgaataaagctaatacctgaattgattgttgtaaggtagaagtagatgacccaataaatgtttgttattaatgaaaaggacatttcctaaggattgtgtagtgttctactgtatggtgcatattcagtggagtgggagttaacttcatagtttgtgtaccatttggatgcacatttgagaggacaacatattattggcactttgcaattttaaaaactcggatgaaagttgccctggtaggaaagaaaatccttactctccctaaaaatgttggctagttgtttttattaatctgacaaatggactaaagaaggttgaccaatgtccacaaatttatgtaaatgaacttatgagcttcatttatccaattccaaagtcatttcagataggataataatgcaatccactagaatatccctttgtaccttgtattgcagaatagataagcatttccccaataactcttaagaatgaatttatgtactgtaaaagatatgacataagagaagtattttgagatatgaagaagagcaacgtagtagggtatatcatttcttagctacatcatatgggcagtatacttgaatgaatatttcctgaagtagaagagtaaagaaaaattatttttataaagaatgttaatatagtcaggaagaggagatgtttggggattggtataaaattgccacaactttacaaaatagttttaaatagtatagatttccctaatatgtgtaatataaaacactagaaatattggggagttggaaatcatagaaatgaacagaagaatgataaaattgtttccatagctaataaaaaatgaatttttgaaatcagtatagtatgaaggctctgagagcaagaactgtatcatattaattattatattgccagtgacaagggcaatacttagttctagctaagagttcaaggtatgtttgcagaatggtgaaagaatggaccaatgtatgcaggtttgtataaaaacccaacgtgatatttctaacaatttggaaaacagagaaagataccttaaagaagttgttataattttttattaagtatatggacgtaaaaacttggcttgttaagttaggcacacaaaaacaattactgcactggttaacttgaagccgcagaggctgtagtttcctagtgctgactctgggcgccgctgttggccaaagtgcagagcttggcgctccagatctcctcgcgcagccgcagcgcgctttccagggcagccccagctcagactccccagcgccggcctttacaccgcttcctcctcggaaaaagaatcgtttcctaaactggaactggaactaaagcccgttcggagatccaaaaatctacaatacagaggttatttgtaacctggcgtctccaggctggtgagcaagctgaggagagcaagagggatggggagcggcgccggggagctgggccgggctgagaggctgccagtgctctttctcttcctgctgtctttgttctgcccggcgctctgtgagcagatccgctacaggattcccgaggaaatgcccaagggctccgtagtggggaacctcgccacggacctggggttcagcgtccaggagttaccgactcgaaaactgcgcgtcagttcggagaagccttacttcaccgtgagcgcagagagcggggagttgcttgtgagcagcaggctagacagggaggagatatgcgggaagaagccagcttgtgctctggaatttgaggctgttgctgaaaatccactgaacttttatcacgtgaatgtggagatcgaggacattaatgaccacacgccaaaattcacgcaaaattcctttgagctgcaaataagtgagtctgcacagcctggcacaagatttatactagaagtagcagaagatgcagatattggcttaaactctctgcagaagtataaactctctcttaacccaagtttctcattaataattaaggagaaacaggatggtagtaaatacccggaactggcactggagaaaaccttagaccgggaacaacagagttaccatcgtttagtcctgactgccttggacggtggacatccacccctaagcggcaccactgagctccggatccaggtaaccgacgccaatgataatcccccggtattcaaccgagacgtgtacagagtcagccttcgggaaaacgtgccaccaggcaccactgtgttgcaagtgtcagccactgaccaagacgagggcatcaactcagaaattacttattccttctacagaaccgggcaaatctttagtctgaattcaaagagcggagaaattaccactcaaaagaaactggattttgaagagaccaaggaatattcaatggttgtagaagggagggatggtggtggactggttgcacaatgtacagttgaaattaatattcaagatgaaaatgacaatagcccagaagttacattccattctctacttgaaatgattctggaaaacgcggtgcctggaacactaattgctttgatcaaaatacatgaccaagattctggggaaaatggggaggttaattgtcaattacaaggcgaagtcccttttaagattatctcttcatccaaaaattcgtataagttggtaacagatggaaccctagaccgagagcaaaccccggagtacaatgtcaccatcacagccacagacaggggcaagccgcccctctcctccagcataagcgtcatcctacatatcagagacgtcaacgataacgctccggttttccaccaggcgtcctacttagtcagtgtacccgaaaacaaccctcctggggcctccatcgcgcaagtctgcgcctcggacctggacttggggttgaacggccaagtctcctactctatcatggccagcgacctagagcctctggcactggcctcttacgtgtccatgagcgcgcaaagtggggtggtgttcgcgcagcgcgcctttgactacgagcagctgcgcaccttcgaactcacactacaggcccgcgaccagggctcgcctgcgctcagcgcaaacgtgagcctgcgcgtgttggtgggcgaccgaaacgacaacgcaccgcgggtgctgtaccccgcgctgggtcccgacggctctgcgctcttcgatatggtgccgcgcgctgcagagcccggctacctggtgaccaaggtagtggccgtggacgcagactcaggacacaacgcctggctgtcctaccacgtgctgcaggctagcgagcccgggctcttcagcctggggctgcgcacaggagaggtgcgcacagcgcgtgccttgggcgacagggacgcggcccgccagcgcctgctggttgctgtgcgtgatggtggacagccgccactctccgccaccgccacgctgcacttggtctttgctgacagcttgcaggaggtgctgccggatatcactgaccgccctgtaccctctgacccccaggctgagctgcagttttacctagtggtggccttggccttgatctcagtgctcttcctcctggccgtgattctggccgttgccttgcgcctgcgacgctcctccagccctgccgcctggagctgcttccaacctggtctctgtgtcaagtctggacctgtggttccccccaactacagtcaggggactttgccttattcctacaacctatgtgttgcacatacaggaaagacggagtttaatttcctaaaatgtagtgagcaattgagttcaggacaagacatactttgtggtgattcatctggggccttatttccactttgtaattccagcgagtcgacttcccatcctgagttggtgagtttcatttatgtctattctttttcattacccacccaattttctgtatttacatgaaactatcgtacattttcaagtccaatgagttgtcttagggaagtcagagctgctcagaaagctgtcctaccattctttaagaggagcagtaaattgtgagtttttatgtcgcataaaagaagtagccttatagatttacaaagtagtgagagtttgctcttagcttcctctctagcaaaaacatttggtgcgtttttttgtcctctttctcaaagctaatgaattttacctattcgttgtctcattctttaacatgtttatattttattgtatgtagataaaccattaaatttaatgtatgtaatcatttaattcatcttttaaagcaaagaaactgctagtagatgtctttcttcactgatttcactggtagttttcatctctttcttatgttcctcatatatgctttcttattcctacctaatggatttatgattttttgaatctcctaaaattttattaaaaatactatatgttggctgggtgcagtggctcatgcctgtaatcccagcactttgggaggccgaggcggttggatcacatggtcaggagttcaagaccagcctgggcaatatggtgaaaacccgtctctactaaaaatacaaaaattagctgggtgtggtggcgggcgcctgtaatcccagctactcaggaggctaagacaggagaattgcttgaacctggcaggtggaggttgcggtgagccgagatcactccattgcattccagcctgggcaacaagagcaaaactccatctcaaaaaaaaggaaggagaaggagaggaagaagaagaaaaatactacatgttatgtgtatgagagagaaagagagagactgattcactgaacttagaaggtccaaatcatccaaataattttctaagtttatccaggttttcttggatgcaaaatccttttccacctctatataattaccagaagaaacttacaaaaaaaaggaaatgctattgcctgaatttctcttgctcggaatcctgacatattcttgaagaaggggaaaaagacaccggatttgtcttatcgtttggagctttaaatataaatgactggatgttttctcaacatccttgtaggatggaaggtgaatacaggattattccatttttaagacaaaaactactagtcttgtgtacatacaaagctcccattacatggtataagtcttttgcttggtttcccttagtatgtgattcagtaaatgggttccttacaaagtgctgagatttcttataataccacttacttttaacctttcagtagttttctttgttgtatattttgtgttctttttcccaaattattatataagtttaagtgatgcttagaataatgtttaagaccactttaaaattgcataatttattgatgaaggattaaaatagaaacttgcttttcagtgtatatgcatttgaatcattgaaacacagtctgtgcatgcattacatattcacattaaaaaactaagcatttttgaaatagcagaaaagtttaagcaattacaaaaatgtgaaaatttccaactttaatcctgttaatatttagcaatattaggcgagaacatctgtaactattgctgaattaatattacttttataatacaaaaatttaaaataaacgtttttccaggaattttatcatcaaaataaaccccagaaaataatttcaaagtggataatctatccttatatatgtattaatacaattatatattttacatttacaaatatataggtataaaaattaaaaatgaatgtacttccaaacaagattgcacataaaaattacttcagaaaattgttaagatacacagaaaaaattgaagcatcataaaaaggaaattataatagtttacatatctagaaatagagtgcaaagttctaccaagaataagaataaattaatattaagcaatggtttgtgattttataatacacttacagaaattttattccactttatttacaactcagatatctaaaaaatagattgcttttgaaatacaaatgcaagaaacaattggagaaatctaaaatcataattagaagagagtagtgttttctttatcagccatctgatataatgttacacatcagtgggtgtagtaacggcttaggactctgagcgccgctgttgatcaactctaagcgaaaatcaggactccatccggatttccagttctgcggctacacaaaacccggcagataccacaaacctgctcccaggctgcagcaaaactcagcctctttcttctaaggaaaagatcaccatactttgcagggtggaagaaagaacctgatgaagcagcgcgcacagagatccttttgagaaaattccaaagcgaggcagcaatggcagctccaaccaaatgccagctccgcggaagattagtcctgctatgctcgctcctggggatgctatgggaggccagggccagtcagattcgctactcagtgcctgaagagacagaaaagggctatattgtgggcaacatctccaaggacctggctctggagccccgggagctggcggagcgccgagtccgcatcgtctctagaggtaggacgcagcttttctctctgaacccgcgcagcggcaccttggtcaccgcgggtaggatagaccgggaggagctctgtgctcagagcccgcggtgtctggtgaactttaaagtcctggttgaagacagagtgaaactgtacggaatagaaatagaagtaactgatattaacgacagcgccccaaagttccaggccgaaagtctggaagtaaaaattaacgaaatcgcggttcctggagcacgttatccacttccagaagctattgatccggatgttggcgtgaactccctccagagctaccagctcagccccaatcaccacttctccctgaacgtgcagactggagacaatggagccataaacccagagctggtgctggagcgcgccctggacagggaggaggcaactgcccaccacctggtcctcacggcctcggatggcggcgagccgcgtcgctccagcacagtgcgcatccatgtgacagtgttggatacaaatgataatgccccggtttttgctcaacggatttaccgagttaaagtccttgagaacgtgcccccaggcacctggctgcttactgcaacagccagcgacctggatgagggaatcaacggaaaagtggcatacaaattctggaaaattaatgaaaaacaatctctgctattccagcttaatgaaaatactggggaaatatcaacagcaaaaagtctagattatgaagaatgttcattttatgaaatggaaatacaagctgaagatggtgggggattgaaagggtggacaaaagtgctcatttcggtggaagatgtaaatgacaatagacctgaagtgaccattacatctctgtttagcccagtgagagaagacgcacctcagggaacagtaattcttcttttcaatgctcatgaccgagactccgggaagaatggtcaagttgtctgttctatccaggagaatctatcttttacattagaaaattcagaagaagattattacagattgttgacggcccaaattcttgaccgagaaaaagcctcagaatataatatcacggtgactgcaacagacagaggaactccgcccctgtccacagaaattcacatcaccctgcaagtgactgacatcaatgataatccacctgctttctctcaagcctcctactcagtctacctcccggaaaacaacgccagaggtacttccatcttctccgtgattgcctatgaccctgatagcaatgagaattctagagttatttactccttggcagaggataccatccaagggtctcctctctccacctatgtctctattaactcagacactggtgtgctgtatgctctgtgctcctttgactatgagcagtttagagatttgcaaatgcaggtgacggcaagtgacagtggaagcccaccacttagcagcaatgtgtcattgagactgtttgttttggaccagaatgacaatgccccagaaatcctgtaccctgccctccccactgatggttctactggtgtggagctggcaccccgctctgcagagcctggctacctggtgaccaaggtggtggcagtggacagagactcaggccagaatgcttggctctcctaccgcctattcaaggccagtgagccagggctcttctcggtggggctgcacacaggtgaagtgcgcacagctcgggccctgctagatagagatgcgctcaaacagagccttgtggtggctgtacaggaccatggccagccccctctctcggccactgtcacgctcacagtagccatagctgacagcatcccagacatcctggctgacctgggcagtcttcagatccctgcagacctggaggcctcagaccttaccctctacctcgttgtggctgtggcagtcgtctcctgtgtcttcctcaccttcgttatcacgctgctggccctcaggctgaggcactggcactcctcgcatctgctgcgggctaccagtgatgggttggctggtgtgcccacctcacactttgtgggtgtagatggggttcgagctttcctacagacctattctcaggagttctccctcaccgctgactcaaggaagagtcacctgatcttcccccagcccaactatgcagacacactcatcagccagcagagctgtgagaaaaatgagcctttgtgcgtctctgttgattccaagtttcctatagaagacacccctttggttccggtgagttcattttttttctttctttcttttctttttttgttttttgttttgttttgtttttgagacagagtcttactctgttacccaggctggaatgcagtggtgtgatctcggctcattgcaacctccgcctcccaaattcaagcgattctcctgcctcagcctcccaagtagagtagctgggactagagtagagtagctgggactacaggcctcccaagtagaataactgggactacaggcacgtgccaccacgcccggctaattttttgtgtgtttttagtagagacggggtgtcaccatgttggccaggctggtcttgaattcctaacctcaagtgatccacccacctcagcctcccaaagcactgggattacaggcgtgagccactgcgcctggcccttaactttctattatagttagctttctctttaactgtctgtacttaaggtagtataagttgatatcagtgtgtttctcatcacttttcactgggcctaattgttgctccaacactgaaaggaggcatttattagttatatttgctgatataactttcatgttctcataataattaacctgctgtcaacgtaaaccatacttcatggggtagctctcagcctgcattgatgtgggctttttgggtagggttgcttcattggttgcagtggactcatatcataaaattcttactcctttttttttttttttaagagatgggggtgtcattctgttgtccagggtggaatgcagtggtgtgggtaaagcttactgcagtctcaatctcctgggcttatgcaatcctcccacctcagccttcacagtagctaggactgaggtgggagggctagcaagctatgttgcccagactggtctcaaacgatcttcctgcttcagtttcccaaagcactgggtgaggtgtgaaccacctcacccagcaaattcttactcctacgatcatttattcaggtcatactatgtttgtaagggtaaactgataaaaaggtaaatgtattcttcttagagaaacagctgaaagcccagatttattgcttctattcttccatttctatgacaggaaaacacctctttgaggttatatttttcagatcacaagtgtgtaaagtctgtttgtgtttacagatattttctgacgaagattcaaacttcagttatccacttccaaaccctagtaaaccaattttttccctttaatggtgaaagttgtcacatcttttattctcatatcttcaaaggtcttaatttcctaatgctttaatgttaaattatggagaatagtaggacattcttcttttctatagtatatgcttgctcaagagaagtttctaagactggacactgtgaaatgacaaaacaaggaattaaaaatatttctctcacttatatattatttctggctcaattctccaacttttgagtctagaaatgaacttgcatatcagatataatttaagaaaatattctcaggaactgctgggaagattctaaaactattttactgtttttagctataaggaagagaataatgtattatttaatgttattttaaacatagtgttgtttcaaatagtaaataacatttcacaagacatttgaaaataagctttgaagttgactcaaaattctatgctaaacatgtgatccatagatacactgatgactgctggcatttctgtggaaatgaagaattgttttatttgtttgtaattatttgggtttcagttgctttatttttaagaaaaaaaagctgaagtgtctgggaatcctttatgacatacagacattttaattatttcaaacacgttttcccccttaagtgggtagcaaaaaaaataaagcatacttcaggctcatatttttaaccatgcaacaagaaaattgttacaatttctgttctgaggagtagccttcatacttagtatttataaatattgaaatgtatgttaatttggggaaaacataacagatatccatgaaggcttgtatgtcatggtaggtagttactattcgataccacaaaaatgtctcttgcccttaaaaccagaacacgaggctcaccagacagatgactgaatggagtatggaaaatctttatttctgtttttcttaggctatgtaggacttaacttattgtgcattggtaacagattgtagaacataagctgaaagataaaattcttgaccttaatgtctcatcttaaaaagaagcattggttgacattctatatctcgtattacttaaaaataatgggggagcgcagtatatattaaacaaagattggctttgtggtgatcattgttgaaggtggggtgatggctatgtgaaggttcactatatatactccctactgttgtataagtttgaaattgtgcataatagatttatttaaaacacaaagcatagaaatatctactataatattatggtgagagcaaaatttgagggggatgtacacctgcattttcgaagaatatatacatttcggagaccgaattcaaaatgaaaaaccgggctgctgtcccgcacggagcctctgggcgccgctgtcggccagtgcagagcaagcgctgacgccggggatccgtcagcctctggcctgggattccctgcgcagccaacaacagaaagaagaaaaccagctcccacacagagcctcccggctgcgcagacctttcccagcacagcggattgccagctccgagacccgggactcctcctgtcctgggccgaatgctcttttagcgcggtagagtgcactttctccaactggaaaagcggggacccagcgagaacccgagcgaacgatgggagggagctgcgcgcagaggcgccgggccggcccgcggcaggtgctatttcctttgctgctgcctttgttctaccccaccctgagtgagccgatccgctactcgattccggaggagctggccaagggctcggtggtggggaacctcgctaaggatctagggctcagtgtcctggatgtgtcggctcgcaagctgcgagtgagcgcggagaagctgcacttcagcgtagacgcggagagcggggacttacttgtgaagaaccgaatagaccgtgagcaaatatgcaaagagagaagaagatgtgagttgcaattggaagctgtggtggaaaatcctttaaatatttttcatgtcattgtggtgattgaggatgttaatgaccacgcccctcaatttgataaaaaggaaatacatttagaaattttcgaatctgcatccgctggtacacgactatcgcttgaccctgccacggatcctgatataaacataaactcaattaaagattataagataaactctaatccttatttttcattaatggttagagttaattccgatggtggcaaatacccagagttatctctggagaaactcctagaccgggaagaacagagatctcatagcttgatattgactgccttggacggaggggacccaccaagaagtgccaccgctcacatagaaatttctgtcaaggataccaatgataaccccccggttttcagcagagacgaatatagaattagtcttagtgaaaatctgccccctgggtcccctgtgttgcaagtgacagccactgaccaggatgagggggtcaatgctgagataaactactacttccgaagcactgcccagagcacaaaacatatgttctcattggatgagaaaacaggtatgattaagaataaccagtcatttgattttgaagatgtagaaaggtacaccatggaagtggaagcgaaggacggaggtggtctctctacccagtgtaaagtaatcatagaaatccttgatgaaaacgacaacagcccagaaataatcatcacttctctctctgatcagattttggagaattcacctccaggaatggttgttgccctcttcaaaacacgggatctggatttcggaggaaatggagaagtcaggtgtaatatagaaacagacattccattcaagatttattcttcttccaataactactacaaactggtgacagatggagccctggaccgagagcagacaccagaatacaatgtcaccatcgtagccactgacaggggcaagccgcctctttcttccagtagaagcatcaccttgtatgtcgctgacatcaacgacaacgccccagttttcgaccagacgtcctacgtggtccacgtggccgagaacaacccgccaggagcctccattgcgcaagtgagcgcctctgacccggatttggggctcaatggccacatctcctactctatagtggcgagtgacctagagcccctggcggtgtcgtcatacgtgtcagtgagcgcgcagagcggggtggtgttcgcgcagcgcgcctttgatcacgagcagctgcgcgccttcgcgctcacgctgcaggcccgcgaccacggctcgcccacgctcagcgccaacgtgagcctgcgcgtgttggtgggagaccgcaatgacaacgcaccgcgggtgctgtacccagctctgggtcctgacggctccgcgttcttcgatatggtacctcgctctgcagagcccggctacctagtgactaaggtggtagcggtggacgccgactcgggacacaacgcctggctgtcctaccacgtgctgcaggccagtgagcccggactcttcagcctggggctgcgcactggggaggtgcgcacggctcgagccttaggcgacagggacgcagcccgccagcgcctgctggtcgctgtgcgtgacggtggacagccgccactctctgccaccgccacgcttcatctggtcttcgcagacaacttgcaagagatactgccagacctcagcgaccgccctgtactctctgacccccaggctgaactgcagttttacctggtggtggccttggccttaatctcagtgctcttcctcctcgccgtgattctggccattgccttgcgcctgcgacgctctctcagccctgctacttgggactgcttccatcctggtctctgtgtcaagtctggacctgtagttccccccaactacagtgaggggactttgccttattcttataatctgtgcattgcacatacgggtacaaaagagtttaatttcctaaaatgcagtgtgcccctacattccaatgaagacatggtttgcagtgtttctcctggagccttaattccacctcatggtggggaggatttgacttcacatcctgagactctgacttcggtgagtttctcttttttgtgtgtgatttatctaatagtctactagtttctcatattttaggcatactactttattttcatatctagaatcatatgtttaaaatccatagctttttacaatattttctcaatgttttttcaattatagttttcactatgtatttggttcataagttgctctatctttttgtaaaataatgtcaccagactgaagatattttgtctttgtcttttttttttttttttttttttgagatggagtctcgcactgttgcctaggctggagtgcagtggcgtgatctctgctcactgcaacctccgccttctgggttcaagcgattctcctgcctcagcctcccaagtagctgggattactggtgcccctcaccacagctaaattttttgtatttttagtagacatggggtttcactatgtcgaccaggctgttcagaaactcctgtcctcgtgatcctcccaccttggcctctcaaagtgctgggattacaggcgtgagccacaatattttgtcaagttctgactatcgaacagaagcagtggtcttggcatctaagaaaacaaacaagtaacctatctattcaaatttgcgaagacttagtgaatttacgatatcttatttatatatttttaaagcctaaaaatattcagaagacaggcccagtggctcacacctataatcacagcactttgataggctgaatcggaaagtatcacttgagcccaagaattgagaccagcctgggcaatatagggagaccccccatctctactaaaacaacaacaacaaaaaaaaacattagcagagtgtggtagcattcccctgtggtcccagctacttgggaggctgagctgggtggattgcttggtcctgggaggtcaaggttgcagtgagccctgatcttgccactgcactccagcctgggcgacagagtgcgaccctgtctctaaaataaataaataaatatgcaggcagggccaagtgtgctgtaatcccagcactttgggaggtggaggtggagaatctcttgagcgcaggaatttgagaccagcctgggcaacacagggagactccatcgctacagaacatttaaaaattagcagggtgtggtggcacatgcctgtggtctcagctactctggtggctgtggtgggagaatcgcttgagcccaggaagtctaggctgcagtgagctgtctaggtgacagagtgagaccctgtctcaaaaaaaaaagacatttctaagaaataaatgaaatactattgcctttgcactcagtctctgtctctgattctctgatagaagatttttgaagaaaaaagataaaatctttgaagagttctatacttggaaggcatagtgacataaacacttctgaacatcctgttctctgtgtgaaagaagtgaacttctataccctttgcatttgagggaacaattgctactgggttgatgggcacacacagttgaagatatgtgaaccactggactttggcctctgatacaaactgcctaagagaagagattatttatactggtattaatgctctgatgaaaacaggtcatttgacataaacacttacttgttaaaaacctatatcactacatctaactttgttttctaaaacttttagtacttcaaattctacgtatttcttttctcattacaatgcaaacagtttaatttgcaactgtaatatatgttcattttagtttgtgattacctgcttaatcatttaaataggtccatttaacttgtatccctgtaagataaagtatgttttacacaaaaaggttaattaaggctcagtaaaactattctagaagagtactttaaaaacctcttacacaatcctaagctaaataagtttaatgaattaagtagttacaattataaagcttcagagtgaattatctcatgagtttatttaatataatctttgtatgaatgtatactaaataaaattggcctattcaaatcacaattttaaattataagacttttctgaatttacctagacactaatatgacctaaaataagtattatttaccttttattaaagtgtgtacatttctgttgggaaaacgtgttgcaaatatatatttaaccaaacattatcttgaaatatttacaatattttcactccactttatcacacctcccctaagaaacctacatatagtaaattatttaaagataggagtggagaaaccaaagaatctatgtaaaatataataatccaacagaatagtttactttccattgcatgtatcacttgggtgcagtaacttcttaggactctgagcgccgctgttcacctactaggagagaaaacgcagccagagctcaatccggattctcagggcttcaactacacaagccccacaaaccggctgctgggctgcagggaagctcactccagaatttaaagtgcccaggctacagagacaccctgaagccacagaaagacaaaggaaccggttgaaacacacaacgtgtccagtgaggactttgcagaattctgtaaccagactacaatggccgctcaaaggaatcgctcaaaggaatcaaaggattgcagcgggctggtcctgctctgccttttcttcgggattccatgggaggctggagcccggcagatctcctactcaattcctgaggaattagagaaaggctctttcgtgggcaacatctccaaggacttgggtctggcgccccgggagctggcggagcgcggagtccgcatagtctccagaggtaggacgcagcttttctctctgaacccgcgcagcggcagcttgatcaccgcgggcaggatagaccgggaggagctctgcgctcagagcgcgcggtgcgtggtgagttttaatatccttgtggaagacagggtgaaactttttgggatagaaatagaagtaactgatatcaatgacaatgctccaaaattccaagcagaaaatctagacgtaaaaattaatgaaaatgtcgctgcgggaatgcgttttcctctcccggaagctattgatccggatgtgggcgtgaactccctgcagagctatcagctcagccccaataagcacttctccctaagagttcagagccgtgccaatggcgtcaagtacccggagctggtactggagcactccctagatcgcgaggaagaggccattcaccacctggtcctcaccgcctccgacgggggtgaccctctccgatctggcactgtccttgtcagtgtgactgtcttcgatgcaaatgacaacgcgccggtcttcaccttgccagaataccgagtgagtgttcctgagaatttgcctgtgggcactcagctgctgacagtcacagccaccgacagggacgaaggtgccaatggagaagtgacatattcattccgaaaattacctgacacgcaattgttgaagttccaactaaacaaatatactggagaaataaaaatatcagaaaatctagattatgaagaaaccggtttctatgaaatagaaatacaagcagaagatggaggagcatatcttgcaactgcaaaagtgttgattacagtagaagatgtaaatgacaacagtccagagctgaccatcacgtctctatttagtccagtgactgaagattcacctctgggaacagtcgtagcccttttaaatgtgcatgatttagactctgagcagaatggacaggtaacctgttccattttggcgtatctaccatttaaattagaaaagtccattgacagttattacagattggtgatacacagagcccttgacagggaacaggtatcctcttacaatatcacagtgacagccacagatgggggaagtcctcctctatcaacggaagctcactttatgctacaagtggcagatatcaatgacaacccacctaccttctctcaagtctcctactttacctatatcccagagaacaacgccaggggtgcctccatcttctcagtgacagcgctggacccggacagcaaagagaatgcccagattatttactccctggctgaagacaccatccagggggtacctctgtcctcatacatatccatcaactcagacactggcgtcctgtatgcactcagatccttcgactatgagcagtttcatgagctacagatgcaggtgacagccagcgacagcggggatcctccactcagcagcaacgtgtcgttgagcctgtttgtgctggaccagaacgacaatgcgcccgagatcctgtaccccgccctccccacagacggttccacaggcgtggagctggcgccccgctccgcagagcccggctacctggtgaccaaggtggtggcggtggacagagactccggccagaacgcctggctgtcctaccgtctgctcaaggccagcgagccgggactcttcgcggtgggggagcacacgggcgaggtgcgcacggcgcgagccctgctggacagagacgcgctcaagcaaagcctcgtagtggccgtccaggaccacggccagccccctctctccgccactgtcacgctcaccgtggccgtggccgacagcatcccccaagtcctggcggacctcggcagcttcgagtctccagctaactctgaaacctcagacctcactctgtacctggtggtagcggtggccgcggtctcctgcgtcttcctggccttcgtcatcgtgctgctggcgcacaggctgcggcgctggcacaagtcacgcctgctgcaggcttcaggaggcggcttgacaggtgtgtccggctcgcactttgtgggcgtggacggggttcgggctttcctgcagacctattcccacgaggtctctctcaccgcggactcgcgaaagagtcacctgatcttcccccagcccaattatgcggacacgctcatcagccaggagagctgtgagaaaaacgatcctttgtctttgttagatgattcgaagtttcctatagaggataccccattggttccagtgagttttattttcatttttacttttgttaaaaaaaaaaagattggtttttactttgaagtttgcggcatgatggtggaaagtgtaaatgctaaaacactgatgagtagaatttgatgtttattaaggttttttttttttttttttttttttttttttttactttctggtaaaattcacctagtctcaatcaaggcctatatatcataaggctttgttatgattagctttgcagaaccttgtagtttatagtgttgttgagtacaatattgacaattcctaagacagacttccatacagaagtgcctgtcaatttatatttcctcctgggtggtcacatattgaaactccagccccttaagcaaccctcttgttctgaaggcaggtctggtaagaataggtaagtatcagaaagaaatcacctctggaaacacaacccaaatccaagaatactcaatgcagttcttcccaaggagaagggcaataggcctttttcaaactacattttatatatttttcaatctatactttgtggtgatagttgcagttgaatatactaagtttttcattaatattgaattaacaatttatttataacaatgtatgcttagatttttccagccctatttataactgataacactgcagtatcctttttgcatacaattctctaatttcacactgctatgtggaagatatagcattttaatttaactttcattgctcaatagggatcctgaggaggctatagagggtgaaattaagaatatttgggattctgcttttgtcttttttgttaaattttctagtgactaaggctgaaagtaaatatgggttgggaagacagataaatttgtacatgttcccgagaacaggagcaagagatatatgacaaagctatttcagtggctctttaatgtataaggaggcaaacacctgaaactctgaaaactctgaaattgagaggcaaaataaacttagagtcaagaaagaaatgccatttctgcagatcagaatataaacaccaaccacagctgtaaaaaagaaaagaatatatgcaacgaagggaaattatataaacaaaggatcattggaggtactgatgagttcatttagttcaatgaaaatagtgacgtattaggtagatctcttaattttattactagtattctactaaatgtggtagtataaagtcaaaaagcattccgaagtttctcaagacccttataattccatgatttttttcaggtcagtcaacatttgttgaatgataggtctgtggaaggaaagcacactctttagggtcatagttattaactattaaaccattgaaactattattttatatttgtgttaatgagagtcaaaattattgtgcattcatctcaaataattctattattttgaaaaatacaggttttttttttaaaaaaaactgctcttgacattgtagctattgtgagaaaatattttgattataattatttaaaagcaatacaggacaccctggatgatggtaatgactagggcaatggttgcattccagtacttaagtatgaaataaggaattattactttctgggtgaatataggctagaattgaagacaaaaaaatttgttgcttatcttcagtacttccagcttcatagataattactcttaaaaggaacaagaatgactgcctctggatggaggaattggatagcaatgggccgtgggataggagacctataaaccttcatgctatattattttgtgcctttttaaattttgaagaaaaaatattcatttattcaagatatatgtaaattcagtaaataaaaagatatgatagttatgaccaagtggaaatatatttcctgatgtaaaaggaatcactgaggaaaaagattaaaatattttggctgtcaactcgtagtttaaaaaaaattccttgaaagaggtagagaaaagtcaagttgcagtcccacacagagcctctgggcgccgccgtcggccagtgcagagcaagcgctgacgccggggatccctcagcctctagcctgggattccctgcgcagccaacaacagaaaagaaaaccagctcccacacagaggctcccggctgcgcagaccttgcccagcacaccagattgccagctccgagacccgggactcctcctgtcctgggccgaatgctcttttagcgcggtagagtgcactttctccaactggaaaagcggggacccagcgagaacccgagcgaacgatgggagggagctgcgcgcagaggcgccgggccggcccgcggcaggtactatttcctttgctgctgcctttgttctaccccacgctgtgtgagccgatccgctactcgattccggaggagctggccaagggctcggtggtggggaacctcgctaaggatctagggcttagtgtcctggatgtgtcggctcgcgagctgcgagtgagcgcggagaagctgcacttcagcgtagacgcgcagagcggggacttacttgtgaaggaccgaatagaccgtgagcaaatatgcaaagagagaagaagatgtgagttgcaattggaagctgtggtggaaaatcctttaaatatttttcatgtcattgtggtgattgaggatgttaatgaccacgcccctcaattccggaaagatgaaataaacttagaaatcagtgaatccgtcagcctggggatgggaacaattcttgagtctgcagaagatcctgatattagtatgaattcgctgagcaaataccaactaagtcctaacgagtatttctcattggtggagaaagacaatcctgatggtggcaaatatccagaattagtattgcagaagactctggaccgagaaacgcagagcgctcaccacttggtactgaccgccttagatggtggggaccctccccgaagcggtactgctcagataagaatcctggtaatagatgccaatgacaaccccccagtgttcagccaggacgtgtacagggttagccttcgggaagacgtgcctccaggcacctccatcctgagagtgaaggccactgaccaggacgagggcatcaactcagagatcacttattccttctttggtgtggctgacaaagctcagcacgtgttctctctggattacactacaggaaacattctaactcagcagcctttggattttgaagaagtagaaagatatacgataaacatagaagcaaaagaccgaggatctctctcaacacggtgtaaagtaattgtagaagttgtagacgaaaacgacaacagcccagaaataatcatcacgtcactctctgatcagattatggaggattcccctccaggagtggttgttgccctcttcaaaacacgggaccaagactcaggggaaaatggggaagtcaggtgtagcttaagtagaggtgttccatttaagattcattcttcttctaataattactacaagctagtaacagatgaggccctggatcgggagcagaccccagagtacaacgtcaccatcgcagccacagacaggggcaagcctccgttatcctccagcaaaaccataaccctgcacattactgacgtcaatgacaacgcgccggttttcggacagtcagcctacctggtccacgtgccagaaaacaaccagccgggtgcctccatagcgcaagtcagtgcctctgacccagacttcgggctcaacggccgtgtctcctactctctcattgccagcgacctggagtcacgaacgctgtcgtcctacgtgtccgtgagcgcgcagagcggggtggtgttcgcgcagcgcgccttcgaccacgagcagctgcgcaccttcgagctcacgctgcaggcccgcgaccagggctcgcccgcgctcagcgccaatgtgagcctgcgcgtgttggtgggcgaccgtaacgacaacgcaccgcgggtgctgtaccctgcgctgggtcccgacggctccgcgctcttcgacacagtgccgcgggccgcgcagccaggctacctggtgaccaaggtggtggccgtggacgcggactcggggcacaatgcctggctgtcctaccacgtggtgcaggccagtgagcccgggctcttcagcctggggctgcgaacaggcgaggtgcgcatggtgcgtgctttgggtgacaaggactcggtccgccagcgcctgctagtcgctgtaagagatggaggacagccacccctttcagccactgccacgctgcacctggtgttcgcagatagcttgcaagaggtactgccggatttcagcgaccatcccacaccctctgactcccaggctgagatgcagttttacctggtggtggccttggccttgatttctgtgctctttctcctcgcggtgattctagctattgctctacgcctgcgacagtctttcagccctactgcaggagactgctttgagtcagttctctgctccaagtccggacctgtgggtccccccaactacagtgagggaacgttgccctatgcctataatttttgtgtgcctggggatcaaatgaatccagaatttaattttttcacatctgttgatcattgtccagccacacaagataacctcaacaaagatagcatgctactggctagcattttaactcccagcgttgaagcagataagaagattcttaaacaggtaagtatttaaaaatgtatttaatcctttttatattacaatatgccaatatattccaatatagtggtattattttaagattctagataacttcttcatagagttcgcaaaatataggtcaaatttatggttatcattattaaaacaaaagtttaaattaaatgcctcagtcttcctactattcaaagacattttaaagcaaactacatgggtaatctccggtgacatttttatgaagtaaaatacctttcggttaaaaatataaaatacaggtatatttttacggcatggtattttaattgaaaccctgatgctactcaatttttctcaagtatttcatcttcatttactcaataaaggaaccttgtaagaattatagttaggcatcctacctgatgattttatcgggaccgtattatttccacttccagaaatgtcgttcctttcagtcggttaaaatcaattggaaccaactacaacctacaagttttcagctccagtaatattttgaaaactttttaaaaattaagcaagcccttttaataattactcctttcgcaggtgttcttggtaaagttttaacgtcacataatgtaagtattgtgtatcatcgtttttaagctctacaaatacgtgtgattcacaaaggtgagcgtaatcatttcttctggaatttcttagtcgttgcaataataagaatgggctctaggcgccgctgctcaccaatcagggaatgggaagctgcgcgccattgagtccctccctcccccgcctctaccacacaaagcggaatgagatggatactcacagatcctgacactggagacttagaagtattttccttcgctttctgatatattttggatgtagtcggcctaggacttcatagatacataagccgattcacaaccaaccagctcgagaaaccgcggaatatcggcttagagcctgccatggcgaatcggctacagcgcggggaccgcagtcggctgctgctgctgctgtgcattttcctggggacgctgcgggggttccgggccaggcagatccgatattcggtgccagaagagaccgaaaagggctccttcgtgggcaatatctccaaggacctggggctggagccccgggagctggcgaagcgcggagtccgcatcgtctccagagggaagacacagcttttcgctgtgaatccgcgaagcggcagcttgatcacggcaggcaggatagaccgggaggagctctgtgagacggtgtcctcctgttttttaaatatggaacttctcgtggaagacaccttgaagatttacggagtggaggtggaaataatagatattaatgataacgcccccagcttccaggaggacgaagtggagataaaagtcagtgagcacgcaattcctggggcgcgatttgctcttcctaatgctagggatccagatgtgggcgtgaactccctccagagctaccagctcagccctaataattacttttccttgcaactgcggggcagaacggatggggccaagaatccagagctagtactggagggaagcctggaccgagagaaagaggctgctcacctgctcctcctcacagctttagatggaggcgatcccatccgaaagggcgcagttcccattcgtgtggtggtcctcgatgtaaatgatcacatcccaatgtttacacagtccgtatatcgcgtgagtgttccagaaaacatcagctccggaactcgggtgctgatggttaatgcaacggatccagacgagggaatcaacggggaagtaatgtattcatttcggaacatggaaagcaaggcttctgaaatattccaattggattcacaaactggagaagttcaagtacgggggtctctggattttgaaaaatatagattctatgagatggaaattcaaggccaagatggtggaggtctctttaccaccacgacgatgttgatcactgttgtggatgtgaatgataacgctccagaaataactatcacctcttctattaattcaattctggaaaactctcctccaggtacagtgattgctcttctaaatgtgcaagatcaagattctggagaaaatggtcaagtctcctgttttattcctaaccacctgccttttaaattagaaaagacttatggaaattattacaaattgataacaagcagagtgctggacagggagttggtccagagctacaatataacgttgacagccacagaccagggaagcccgcctttgtctgcagaaactcatgtctggctgaatgtggcagatgacaacgataaccctcccgtttttcctcactcctcttactctgcctacattcccgaaaacaaccccaggggtgcctccatcttctcagtgaccgccctcgacccggacagcaaacagaatgccctggtcacttactctctgacggatgacactgtccagggggtgcctctgtcctcctatgtctctattaactccaacactggtgttctctatgccctacaatccttcgactatgagcagtttcgagacttagaactgagagtgatagcacgtgacagcggggacccgcccctcagcagcaacgtgtcgctgagcctgttcgtgctggaccagaacgacaatgcgcccgagatcctgtaccctgccctccccacagacggctccactggcgtggagctggcgccccgctctgcggaacctggctacctggtgaccaaggtggttgcggtggacaaagattcaggccagaacgcctggctgtcctatcgcctgcttaaggccagcgagccgggactcttcgcggtgggggagcacacgggcgaggtgcgtacagcgcgggcactgctggacagagacgcgctcaagcagagcctcgtggtggccgtccaggaccacggccagccccctctctcggccaccgtcacgctcaccgtggctgtggccgacagcatccccgaagtcctggcggacctcggcagcctcgagtctctggctaactctgaaacctcagacctctcgctgtacttggtggtggcggtggccgcagtctcctgcatcttcctggtctttgtcatcgtgctgctggcactcaggctgtggcgctggcataagtcacgcctgctgcaggcttctgaaggcgggttggcaggtatgcccacgtcacattttgtaggcgtggacggggtacaggctttcctgcaaacctattcccacgaggtctctctcattgcggactcgcagaagagtcacctgattttcccccagcccaactatggggacacgctcatcagccaggagagctgtgagaaaagcgagccactcttgatagctgaagactcagctatcattttaggcaaatgtgacccgacaagtaatcaggtgagatttatttctctgcctcctaattgttggtgtcttggcacaagtcttttaaggagatgttttttgagcctgttatgaaaactgtttggggggggggtggggcggcatatatttagttcatatatatttagagcaatacatgtgagttttactttgcctttcatgagattacgataatctttcagaacgtttttgtgaaagtcatttttcaatcttggcatattttcttttgatttcaaaggggccattcaactatgctggtttggtttgaagtaagttgaattttagtattatttttctattatcagtgtatgaggctctcaatttattatatatagatacaaattaatgattcacaaacactttttatttccatttcaattttgctgtgccttcactgatttgtagttatattccaccattatttgctattactgctaatgttcaaattttgatcctgttgatttaatagcatgctccctctagctctccttctcatctatctatctatacacatgcacacacacttatacacgtaagcttttctctgagcaattttattttgattcttggtggctggtaatatgcttagatcctgttgactatttcaactttgtctcatttcttcatcctatcaacacagacatattgactggcttttaactactggatttccttgggagataaaatttagatcacattttttcttaagctctagatgtcttttccattactatggtgaagttacattgactgttctgaggaaataattgaattattgaactggtattatttccttttattcttttactttggtgtctgtgtttgtatgtatggaaggttttttaatgtagtaaatccatatatagaaataacttgattttgattcagtgcttctcaaaaacctattttcaaatgtgctaaagatgtctacagatttattcaaatagagtagtttgtgaatatataaatagattgaaggtatttggactttaattaaactgatttagctagtatccttctggctatttttttgttcattttcagtgtagttgggagtcatagattccttctttctttctttataaggtcattcttatggcaaatagtacattcagttcttttattcagaccaacttgttattgaagcttgatagttgcctgacatacatgttatctgaagcaatgtctaggaaagccaaatgaggaaaggagacttatctagggtttttgatcacaggaatcatttccataatcaattcagtcaacactctcacatcacttctaggtatttgccccaaattacttggatatttatgttccctttcaagtttagttttctcatttaggaatttaccttatgtcattagttgtaaactgactatctagggctcggacaaaaataatttcaactgtaggaaaggcaagtcttccaacagatgcctacatttttcttgaagtcaagaaaaatgttcaggtattttgagcatctagggataggatttatacttgtggaattccaaactgagaaaaatgatgtaaggcattgtactttgactggaattagttaaataaaaaggatatgaggtatttggctgggaaaaggagattgttccatattataaaacctcatctaaactaacttcccaagatcgtggagaacaaaaaggaagggttggctttgaaatgtgatattaagagggttatgttgattcggaggtagtgataaagttctgttaaggtataacatatagtcccattaaatagaggataaaaataaaacaccatcacatttcatgttattaattcctatggcaacctactaggctatacctttatattctctttatgatgaaacatgaaacaataatccttttcagaaacctcttttataagtgataagaagggtttggctaactttattctgaatatgccctatatagctttcagtgctcctccagttttctctgataaaactaggaggaaaattatctgcacatcagattgaaaataatactgcatatcatttcatagtggtcaaaattttcccataccacttgatggggatgttttcccacaaggtttttgttctacaacaggagagaagactttgcctagttcttccaatatgtgcattgcttctgcttagaaaaaaacaaacttttaaattctctttgctgggttaatgactgttctatagattcccatctctaaggaatcttctttggtagtaaacactggaaaacagtcactacgaaaactcataaaatgtctagtttcctatacattagtccaacacatcagtctaattctgaatcccattgaattagcaaaggcttccggctgcagttttctaaatagactcagagccctgctgttggccaatgtgctgcaagaactggagcctgggatctaccaggacgatattctgttcagtcacagaagcaagtcggagagtggccaagacttgggctttctgctcctgcaaatctgattccatacggattggggtgccctcaaactgggagcattgagttttctatgtatggaagtaaatattttaaaagcactttgtgaaacattttctcttaacgtcggagactgcagcaacgcatgggaaggatgggaaacagggtgaagcagagaagcaggacccggcagtggcaagcactcttccctttcctgctgcctttgttctgcggggcaccctcggagcagatccgctactctattccagaagaaacggtccagggctccgtggtggggaaccttgcggaggacatgcggctgcatgttcaggatttattgacctgaaaccttagagttagtgcagagaaacaatactttaccgtgaacacggagaatgggaacatacttgtgagtgacagaatagatcgagagtcactgtcttcaaaatcctctgtgtcatacccttagagattgtagcagagaatcctctaaatgtttttcacataaatgtgatgatagaagatataaatgataacccacctcattttccccaaaatagcattgttttacaaatcaatgaactagcaattccaggcattcggtttggcctggaatctgctatagatgcagatgtagggcctcactctctccagagttaccagctcagttctaatgaacatttctctctgatgatggacaagactaaaggcaagaacgctccagaattagtgctggagaagcccctgggccaggagcaacagagctctcatctcctggtcctggaagcaatggacatgggtgacccagtcccaactggcactgctgcaattcaaattgaggtcactgatgccaacgataatgccccagtttttagccaggatgtatacaaagtcagccttagagagaatgtgcccccaggcacctctgtactaaaggtgacagccactgaccaggatgagggtgtcaatgcggagatcacctactctttcaaatccctacgagatgatattggaaatatgtttgtgctagaccatcaaaatggggaaattaaatccaaagacttaatagacttcgaatttcgtagcagttataccatgagagtagaagctaaggatggtggaggcatgaccagcgaatgtaaaattatactagaaatcctagatgagaatgacaatgccccagacgtggtttttacttcagtgtccagttctgtaactgaggacgcagaaccctggacggtgatcactctgttcaaaacacatgataaagattcgagagaaaatggggaggttacatgcctcataaacgaaagagttccttttagaatcgaatcttccgccaataatgactataagcttgtaacagatgggaccctggattgggagcggatcccggagtacaacgtcaccatcactgccactgacaagggcaagcctccgctctcatccagcacaagcctcaccctacgcattggtgaagtcaacgacaatgctccggttttccaccaagtctcctacgtggtccacgtggccgaaaacaaccttcccggagcctccatcccacaagtcagcgcctctgacctggacctagggctgaatggccaagtctcctactccatcgttaccactgacttggagctgcgggcactgtcgtcctacgtgtccgtgagcgcacagagcggggtggtggtcgcgcagcgtgccttcgaccacgagcagctgtgcgccttcgagctcacgatgcaggcccacgaccagggctcgcccgcgctcagcgccaacatgagccggcgcatgttggtgggcgacctcaatgacaatgtgccgcgggtgctgtaccccgcgctggggcccgatggctccgcactcttcgatatagtgccacgcgccgcagagtccggctacctggtgaccaaggtggtggcggtggacgcagattcgggacacaacgcttggctgtcctaccacgtgctgcaggccatcgagcccgggcttttcagcctggggctgcacacgggaacctgctggttgctgtgcgtgacggaggacagccgccgctctctgcgccgctacgcttcacctagtcttcgcagacagcctgcaggaggcactgccagacttcagtgacagtcctgtgccctctgattcccaagcaaagctgcagatttacctggtcgtggccttggccttgatttctatgctcttcttcctcgcagtgattttggcggtcgccttgcacctgcgatgctcttccagcccctctgcctggggttgctttcaccctggtctctgttctaagactagaccaggggtttttcccaactacaatgagggaactttgctttattcctgcaatctgtatgttccctcggattctagaaaaagaagatttaattttctcaccatgacaccagaaacagtccccccacaagatctttctaatgaagtttctctggtagcaagcttcactgaagagaataacaagataagctctaactctgttgctcctactcacgtgagttccaatgaatgtctttcatttacaaatggatgaggtttaattttcaaaccaatattttggcaagaaaatcttaaacatattatatctactattgcttcaggtttgtttgcccactcttaatatttcctgttcctttctgtgtgggccagtaacttcattattagctttcatgtatttttgaaacattttcaccatttttacgggagactttttttttttttggacggagtctcgctctgtggtccaggctggagtgcagtggcatgatctcggctcactgcaagctctgccttccgggttctggccattctcccgcctcagcctcccgggtagctgggactacaggcgcccgccaccacgcccggctaattttttgcatttttagtacagacggggtttcaccgtgttagccaggatggtctcgatttcctgacctcgtgatctgcccgcctcggcctcccaaagtgctgggattataggcgtgagccactgcacccggcccggagacattgtttatacacacacacacacacacacacacacacacacacacgtgtgaaaagtgggtattatgatactgctgtcattgagatattttaattgaggaataaatttttttcctgtgatgtttcttgggacatcaatatttgagtatataaggctttttctttaatccattaactataaattttgaagaaaatgcatgagaaaatggagaaaatgtgttttttttttaaaaaaaattgagattaaggtctcattatgttgcccaggctggactcaaactcttgggctacagtaatcctcccacctcaatctccagagtagctgagactacagttgcctgaaactgtgcctggcagagaaaaaagcttaaaaaaataagaacatggtaatgatttgataatattcagttacatttacttttgattcttgtaattcaagtaaactcaattttatgtctgatattttctcacagctacctatatatttcttcccaatttaaaatatattattttattttatgcctagcaaatatctttacagtataaatatttacgctcatgaaagtacgtagccagttatttcttagggagaattttttccctatattttgatgggcttccaaaagtattaccagtaattctcagtaattacaattaggtcagttacccaggaaaaggtaagtctgtaacattctttggactaccaattttcttttactaagtttcctgaacaataaatatttttgaaatataatgtattaatagaattctggagtacttccattatttccagtcaatgcaagttggaatgcttctactttatgctaaaaatattaatgtttctttttcacttgggttcttgttaagtgtgattctgataatgtatacaatcacatatcatttttaggtttccataatatcatgaaaatttgatttttaagcgttacatgtcaacaacctggtaaagtaatccttccattcaggatcattcaaggaatctatttaaaaatattttccccaaattatagctgaatcagaaagtttaaattattatattatatgatttgtcaaaaagagaaactcctagggagacatctccataataggtgtgttgggggaacagtaatctcaaagcagatgcactaacattataagattaaaatcattgtttatagaaacttccaattcatttaaaagctcattggggaaaaaaaagctcattgggaaaaaaaaaaaaagctcactaaagtttctattaaagcgaatacggtagatttccatccccttttgaagaacagtaggtggagctatttaagatataaaaacgaaatatcctttctgggagttcaagattgtgcagtaattggttaggactctgagcgccgctgttcaccaatcggggagagaaaagcggagatcctgctcgccttgcacgcgcctgaagcacaaagcagatagctaggaatgaaccatccctgggagtatgtggaaacaacggaggagctctgacttcccaactgtcccattctatgggcgaaggaactgctcctgacttcagtggttaagggcagaattgaaaataattctggaggaagataagaatgattcctgcgcgactgcaccgggactacaaagggcttgtcctgctgggaatcctcctggggactctgtgggagaccggatgcacccagatacgctattcagttccggaagagctggagaaaggctctagggtgggcgacatctccagggacctggggctggagccccgggagctcgcggagcgcggagtccgcatcatccccagaggtaggacgcagcttttcgccctgaatccgcgcagcggcagcttggtcacggcgggcaggatagaccgggaggagctctgtatgggggccatcaagtgtcaattaaatctagacattctgatggaggataaagtgaaaatatatggagtagaagtagaagtaagggacattaacgacaatgcgccttactttcgtgaaagtgaattagaaataaaaattagtgaaaatgcagccactgagatgcggttccctctaccccacgcctgggatccggatatcgggaagaactctctgcagagctacgagctcagcccgaacactcacttctccctcatcgtgcaaaatggagccgacggtagtaagtaccccgaattggtgctgaaacgcgccctggaccgcgaagaaaaggctgctcaccacctggtccttacggcctccgacgggggcgacccggtgcgcacaggcaccgcgcgcatccgcgtgatggttctggatgcgaacgacaacgcaccagcgtttgctcagcccgagtaccgcgcgagcgttccggagaatctggccttgggcacgcagctgcttgtagtcaacgctaccgaccctgacgaaggagtcaatgcggaagtgaggtattccttccggtatgtggacgacaaggcggcccaagttttcaaactagattgtaattcagggacaatatcaacaataggggagttggaccacgaggagtcaggattctaccagatggaagtgcaagcaatggataatgcaggatattctgcgcgagccaaagtcctgatcactgttctggacgtgaacgacaatgccccagaagtggtcctcacctctctcgccagctcggttcccgaaaactctcccagagggacattaattgcccttttaaatgtaaatgaccaagattctgaggaaaacggacaggtgatctgtttcatccaaggaaatctgccctttaaattagaaaaatcttacggaaattactatagtttagtcacagacatagtcttggatagggaacaggttcctagctacaacatcacagtgaccgccactgaccggggaaccccgcccctatccacggaaactcatatctcgctgaacgtggcagacaccaacgacaacccgccggtcttccctcaggcctcctattccgcttatatcccagagaacaatcccagaggagtttccctcgtctctgtgaccgcccacgaccccgactgtgaagagaacgcccagatcacttattccctggctgagaacaccatccaaggggcaagcctatcgtcctacgtgtccatcaactccgacactggggtactgtatgcgctgagctccttcgactacgagcagttccgagacttgcaagtgaaagtgatggcgcgggacaacgggcacccgcccctcagcagcaacgtgtcgttgagcctgttcgtgctggaccagaacgacaatgcgcccgagatcctgtaccccgccctccccacggacggttccactggcgtggagctggctccccgctccgcagagcccggctacctggtgaccaaggtggtggcggtggacagagactccggccagaacgcctggctgtcctaccgtctgctcaaggccagcgagccgggactcttctcggtgggtctgcacacgggcgaggtgcgcacggcgcgagccctgctggacagagacgcgctcaagcagagcctcgtagtggccgtccaggaccacggccagccccctctctccgccactgtcacgctcaccgtggccgtggccgacagcatcccccaagtcctggcggacctcggcagcctcgagtctccagctaactctgaaacctcagacctcactctgtacctggtggtagcggtggccgcggtctcctgcgtcttcctggccttcgtcatcttgctgctggcgctcaggctgcggcgctggcacaagtcacgcctgctgcaggcttcaggaggcggcttgacaggagcgccggcgtcgcactttgtgggcgtggacggggtgcaggctttcctgcagacctattcccacgaggtttccctcaccacggactcgcggaagagtcacctgatcttcccccagcccaactatgcagacatgctcgtcagccaggagagctttgaaaaaagcgagccccttttgctgtcaggtgattcggtattttctaaagacagtcatgggttaattgaggtgagtttatatcaaatcttctttcttttttttttttaattgctctgtctcccaagctggaatgcagcggtacgatcatagctcactgcagcctcaaactcctaggctcaagcaattatcccacctttgcctccggtgtaacagggactacaggtgcaagccacctactgtctgcctatctatctatctatctatctatctatctatctatctatctatctattactttcttgtacagacaggagtctcactatgttgagcaggctgatctgaaacttgggctcaggctagcctcctgcttctccctcccaaactgctgggattacaggcgtgaaccacagtgccccgcccttatcagatattcttttctggctgggcgcggtggctcacgcctgtaatcccagtactttgggaggccgaggcgggtggatcacctgaggttgggagtttgagaccagcctgaccaacatggagaaaccccgtctatactaaaaaaatacaaaattagccgggcgtggtggtgcatgtctgtaatcccagctacttgggaggctgagtcaggagaattgctttaacctgggaggtggaggttgcaatgagctgagattgtgccattgcactccagcctgggcaacaagagtgaaactctatctcaaaaaaaaaaaaaaaaaactttatcctctagtttcatccattgatgacacttgctttaatcacttattacaatcacctccaaatgaagattttataattccattgtttcttctacagttgttaattggctttctaccttgaagaagagttttatattctctatatatgtttgtttctatgattctggaagcatggttttctattttattcaatggcctgtaatctgttaatatcaattatttattttgatgctgaaattgtcccaggattggcctttgggactccctttaggctgatttctatgtcctttctgttacagcaagcttgggattatatccaagatttgtaattccaatgtacttacttctgtcagtgtaaacaaagtacgatttctggactagatgacttgggcattgtgggggaggtggaaattagaggtattctctgtttttcctgtaggatcttgcatttcttcctcttgctgcttgtctctttgtgtcgggaacaggccccccaaaatctggccataaactggccccaaaactggccataaacaaaatctctgcagcactgtgacatgttcatgatggccgtaatgcccatgctggaaggtagtgggtttaccggaatgagggcaaggaacacctggcccgcccagggcagaaaactgcttaaaggtgttcttaaaccacaaacaatagcatgagtgatctgtgccttaaggacatgcccctgctgcagataactacctcaatccatccctttatttccgcccatctcttcgtttcccataagggatacttttagttaatctaatatctatagaaatgatgctaatgactggcttgctgttaataaatatgtgggtaaatctctgttcagggctctcagctctgaaggctatgagacccctgattccccacttcacacttctaaaaaaaaaaaaatttttttttctgagcttggagaaatatatcccttagtacacttggcatttataaagcagacatcaataaatttatatatatgtgacagataccaacaacaatccagtccccttccctcataccttatttatgtacatatattttatataatagatataatttattaacaatttataaaattactttgttaatactctatatcattttctagctgaatttatcaatgataatgctcttttcccacttttatttttttcccattgaccatgcagcagttttgtgtagaccgtctgataacaactgatctgtttatctaggggggagaaatctaattcaatggaaaatataaataaaattgtgataaacttttgtaaatagagtggcttttaactacacttgagatggctagcaaattcataaagtgaatttactttctttcaaagttcagtaattctttctggccattagggatatgtccatttatactttctcagtatcccaagtcatttcatggttttaaatcattcatgaacttccaaatatagtgaatttatttcttctgcatttaaaattttatcacttaaatatacaatataccgtattgccatgacgaaaaatggtaaagactatttttcacttctgttatgcatttcattaatacgatatctgtatgtgtttccaagttagacatttcttttgcccatttcctacactaatgatactaatgatgactttgtggaatattcagaattaacaaaatgtgttttgagtgctttttttagtactggggcaaatttgcagtaatatcgcctgctttttacattaaattccccataacttttacaactatgggaaaatttctgaaacgtgcacagattccaagtgttttctgagaactttatgcttattgtagagtggttacagacactgaatgctaaagtgtattactctttgaaaagcattgcttgatttcttttggtgaattctgtaaaggtgcagggaaacataacgtcccaattattttttctttcttctttgtttgctgcctatctactttgaaagatacaatagttaaaacccagaaaagagattggaaaccccttagagaatgaaagacatccaagggctctaaaatgcggcagttgctgcttctgagaccaaaaaagggggcaaaatatagagtgtgtggttctacttgtgtgattttttgaaagaaagtatttgaatttatctaaaaatactaaatttgtatttacattagttttcaaatagaatttaataagtacagtgttctataggtaatattgagagaaatagaggacaatgaaacctctctcctccatcatcttgtatgaactaccaaaatgtttatcatatggacagttctcatatatagtcaaatagaaagaaagacataataggaaaacaaatgacttgggaaactaagctaacatggtctaattattctgacctctgctcacctaacttgatttaggaacaaatcattgagagttagagcatgaatagtcaagactgttagaccatatctcaaatatcagtgacttcaatcaactatgtttccagtttaagctgaataggctttattaaatagttgttgaatgaatggataaacaaataatgtactctggggattacctgataccaggattctgaattttcagatgtatcatagaaggatagcagctttgcaattaggtaaattgttaactgtgtcacctttagcaagttatttaatctctttgagcttcagcaaagtaggaataatcatatctaatttgaaaggtcgtggtgatggctagggctaacaaaaatctgattcacaacatgcaattaattaacagtagccatttttagtggttgaccaaaaaaaggatttatattttcaatgccagcacactcgatgttctgttgggaaaaataataatgatttttgtgtgcttctccatatggtataatggaatgatttgtggatggaaataaaactgttctaaaatttttgtgacagctggtttaaaaatcttaagtgcctaggcacattcttgattgagaagccacagttttaggccataaaagatgggggaaagatttttatatgagacaattttgtgagtgttactttttctttgtctgaaccatagtgaaatctaaacaaggatcttgtgaaacttattttaaagaagcagtttacttcaatgggatcttagataatttcaccagaaaatggatcaccgaaaccagaaggctggtgatcattatttggtttgggccatataagaattgaaactaacggcttagctttaggatttttaggacacttgttgataatttaggattcataattaacatatgtgttgattgttttctgagactaactgggcaatgggtttggatgtgtttacatttattctgattccagtcataaaattatgtcaaggactttccttgtctttttatgtgtatgacagatgtgtatgtatccatttcatctaacaagttaaagcgttcagctataatttaaaatttgtagcttcactgttttatagtacctaaaattggaatgtaatcagtcagaagacattcatccactgctttcattccagaagtattatgctttttgaagcagcaatagcataggaatgttgaggagactatactatacttttatagcatatttaatctcgtagatcacttttcaatgaattataaggctgatgacaaatgagcaaattgtatcagttttctttatgacatgtaacagagtatagctgtgatcatgaattggatagttctggtgtaaaaatctgctttatccccatataagatgtcaggttcagaaaagcaaacacatagtttcgaagagatgttgatcaaactgatgaggctaaatctcaagaaagagacacagttaccctctaatgttacactttgagttcacctttttttttttttttgagacagagtctcaatctgtcgccaagctggagtgcagtggcactatcttggctcactgcaacctctgcctcctgggttcatgctattctcctgccttagcctcccgagtagctgggactacaggcacacgccaccacacccagctaatttttgtatttttagtagagatggggtttcaccatattggccagaatggtcttgatctcttgatcttgggatgcacccaccccacctcagcctcccaaatagctgagattacaggtgtgagccaccatgcccgaccactttgagttcacttttaagaaaccatacttaatggaaaattaccagtaacagggcatactgtttaggatgcattcctaaaatattaatggcaaaagatagccagcctatggcaaagctaattggaaaaaatattttataaaggatgagacttctggataccatatgggaagggctctggttcaggaaaatgtttttaaaaaactgtcattgaagagaccatagaatcaaacaaaataatttaatctgtatgtaaaagaagttggtaccaccataatttttcttatacatgtcatataaggatctactctgtgtattgtcattgagggcagatataatttcttagttcatcattaactctctgaagtatttcacacagtagtttgtacaccttctaagtactcaatacaatgcttgagttcaattattggaaagtggtctcttggagaaaaaagaatcatagtgcaaaaccaattattttacatggacttttcctctatatctaagccctaataagaggcagctgtctgatatacatacatacatacatacatatatatatatatatatatatatatatatatatatatatatatacacacacacacacacatatatgtatatatatatttggagtaggggatggagtcttgctctgtcacccaggctggagtgcaagtggtgtgatctcagctcactgcaacctctgcctcctgggttcaagcgattctcctgcctcagcctctccagtagctgggattacaggcgcctgtcaccatgcccagctaattttttaaaatatttttagtagagacagagtttcatcaagttggccaggctgctcttgaactcctgacctcaggtgatccacctgccttggcctcccaaagtgctgggattataggcatgagccaccgcaccctgccaactgtctgacttatcttaaaaggctaaggacctggtttgtttgtcaaattttgaaaatagatgcctcagttcataagatttccatattgtgtggcaggcgcctgtaatcccagctactcaggaggctgaggcaagagaatcacttgaacccgggagacagaggttgcagtgagctgagatcacgccactgcactccagcctgggcgacatagtgagactctgacaaaaaaaaaaaaaaatccatatgtgaaaattcttagaagcttcctatacaatttcagctgaagattcagccaacagttcattctgagactgtgttccatggaaaaagtaaagcccaggcatggaagtgggaatggaaagaaagattctaagcctacaaatactcaaacatcaagaagaaataaaaataagtcatcacttcgacttcatgtgctaacatcactgaggttataaattcccaggaatattttattgcgggagcaagactgcactgctgcctttcagcttgcaaattccagtgagaaacgtctttctctctgctctcaactaactctacagaacgctgtcctctcatttcttcaggctgcagttctagagtagggactcagagtgccactgttggccagtctggaaacagagataaatgagccaatccccagacattccggcttggtggcttttctaatttcatggaatgcaaatccaagagcagacccacaacattcctattatggctcctagttctacaaattataagcaggaacggaacggatttacaggcaatgagttcagctccttcttggctggagattctataatccaagaagagtttgaaaaggggcttatttgggctggagcagcagcaactctaactgtggaaaaggtggggaatggtgctggactgacagtctgggtagaaccaaggcgactactgcctcctttcctgctatttctatcctgctgggcattctctatgatgcagatccgttattcagtcctagaggagctggccaagagtttggtggtgggaaaccttgccaaggatctgggactcagtgtcgaggacatgcccacttgaaagcttcgggttaatgctgaggaataatacttcattctaagtggggaaagtggagacttacttgtgaatgactgaatggatcaggagcagatacgccccccaattatagcttgggccataacgctttgaaatagttgaaggccaggcatggtggctcacacctgtaatcccagcactttgggaggccgaggcgagcagattacgaggtcaggagttcgagaccagcctgaccaacatagtgaaaccctgtctctactaaaaatacaaaaattactgggcatggtggtgcaggcctataatcctagctactcggggggccgaggcaggagaatcgcttgaacccgagaggcaatcgcaccactgcactccagcctgggtgacagagcaaggcgccatctcaaaaaaaatgaacaaacggtagttgaaaattctttaaatgtttttcacattaatatggagattcaggatatgaagaatcatgcaccacggttcagcaggaatgttattaagttacgtatctctgagtttacccagctggaacaagatttgcaacagaacctgcagaagatcctgatgttgagagaaattccttacaaaattatcaccttagcagcaactctatatttctctttgaagtaaaagtgaccaacagtggaaagacatatgttgatcctgtgttagagaagctgcttgactaggaaaagcagagctcccatcccttagtgctagcagccttagacggccccccaacaaagcagcatcactcaactcctgatcctattggttgaagccaatgacaaccctgtgttcatctaggatgtgtacagcgtcggccttcaggaagatgtgcatccgggcactcctgtgctgagagtgagggccaccaaccaggactagagtgtcaaggcagagatcacatatggcttcacaacccagagtacccatatctagtttggccttgatcaaatagtggagaaatgaaaactttaagtacattggacttttaaagatttttaatttccatggttttggtagcaagtgacagagagggactcattgtccagtgtacagttgagaccgaatttctagaagataatgacaatatcctagaggcgatttttacttctaattccacaatgattcccaaagattctgcaccttggacagtaatcactgtccaggatttaaatcacaagatctttaaatcacaagatctggattcgggagaaaacgaggtcacatgtctgatataagaaaatgcaccttgagaaaaatcttcctccaataattaactacatgcttgtaacaaatggggccgtggaccaggaacagacccaaggtataacatcagcatcactgccactgacagaggcaaaccaaccctctcgtccagcccaagcatcaccctactcattggcgatgccaacgacaatgctctggttttctaccaggcctcctacgtcgtccacgtggccaagaacaatcttcccaaagcctccatagtgtgcaagtagacacctccaacctagacttgggacccaacagccaagttccctattccatcgtggccagtgacctggagccacaggcgctgtgattctaggtgtccttgagcgcacagtgcgccttcgaccaagagcagccgcgagccttcaagctcacgctgcaggcccgcgaccaggactagctcgcgctcggcgtcaacgtgagcctgcgcgtgttggtggacgacctgaatgacaacgcaccgcgggtgctgtaccccagctctggagcgcaatggcttcgcgctcttggatatggtgctgcacgccgcggagcctggctacctggtcaccaaggtggtggctgtagacgcagatgtgagacacaatgcgtggctgtcctaccacgtgctgcaggccagcaagcccaggctcttcagcctggaatgcgcaccgacgaggtgctgacagctcgcacgatgggccacaggaaagcgactcgccagcgcctactggtcgcggtgcactgcggtggacagccgctcctctcgctaccgccacgtcaccaccactaccgcccctcgtcgccgacagcctgcaggagactctgccagacctcagcgatcactctgcaaagctacagcctgaatccaaaattaatttatatctggtgattgccttagctttaatttcctttttattcttcctgattgcattgtttgtgctggttttaaagtgccgaagaccccaaaatgatcctgtctgagtctttcccacggatgtctatcccgcgctaagccccaggtttctgggtaactgtagctctatgatgccatattcctaccaggtgtgtgcttctcctacgaatccagggctgagtgaacttcttttttgaatccctacccctcaggactcaatagcagtttcactgcagaaagccccttggggaaggggatgattgtgattattctaattgcttgggcagaatccactctccaaggtgaaaaattcttgatgaaactaagttcagtcacaagcaggttttcttctagcattaaatattttcagagatctcagtaaaaagcatttctagcagcaagaccaaaggcctaagatgagaaatatttggcatggtgagcttgagggacagtagtcaggcagacaagagtatcagacatgccagagcatttggggcctgtaggtaaggagcatgttttgattatatatatttgtatgtgtttgattatattttataattttactttgatattcaaattgtactgatccaaaaataagggagggacaaatcttggccattgtagtatgagagatgtaaatttacaactcagaatccctgcttatcacttctccttcagcacacaactgtttcattttctatttaagaaacttcctctcactgcaaaaagacattctggctgataaagttagcctataatttcagtaaatctaagaatatgactaatggaagttgccagacctaaactttgaaaattattgttccactgaagagcgtcttatgactgagtgttccagtctccttctcaagctgaaccttgcttttcaaaccagattaagaacactatcataagttatactgcattttatttccctacccatgtccactgcatcattctctatagtacaaagagcttgtctcgccaggcgcatctataatcttagcactttggggcgccaaggcgggtggatcacttgagcccaggagtttgagaccagcctggacagcatggcaaaaacccatctctacaaaaaaaaaaaacaaaaattaacaaggtttagtggtccatgcctgtggtctcagctacttgggaggctgaggtgtgaggatcacctgagtctggggagattgaagctgcagtgagctgtggttgcgctcctgtactccagtctgggtgacagaattagaccctgtcccaaaacaaacaaacaaataaagagcttctctccttatgacttatttaaagcttgggaaattgttccaattcaaatgctttaaatggacttgagctaaaacagaatgtggtatatgaaatgttcttataatcaggtgattgtaaaaattgatccagataatgttagcatagcattttactgaactagtagtttacaaacacttcaaaaattatagaataacatttgcatataaaattcctcatacatttccctatcagtgaattggaagcttacaatatacaatattaccaaaaagacaaaaaaaatgaaaaggaaacagttacctttggaaaacataattaggtaaaatgggtaatatggaaagtctgaaaactgaaaaaattactgataagtcaagagaaaaggaatattagtaggaaaattcataaaagtgtgtctgactactcacagcaggtttccttattggtatgtattctgtggtccatctaagctatgttaattttattttaaatgctacctgggtattggcttctaaaaggaattcagtaaatcagataatttggcatcttcaatctagattctgatgctcacctgaaaagtctgctaaggattggaaaccaagaaaagtgaagtatctcaacagatatgtgtcacttgtgtgtactggattttttttttttttttttttttttttttttttttttgagatggagtttcactcttgttgcccaggctggagtgcaatggcatgctctcggctcactgcaacctccgcctcccaggttcaagtgattctcctgcctcagcctccctagtagctaggattacaggcatgtgccaccacgcccagctaattttgtatttttagtagagacggggtttctccatgttggtcaggctagtcttgaactcccaacctcaggtgatcttccctccttggcctcccaaagtgctgggattacaggcatgagtcactgcgcccggtcgcgtactggatttatattgtgtaatactttgctctagcagtatagtaggtgagacagtgactgtgtctagtgagcaaaaggcacttatttgacacttttgactcttcctttctacttaccttatttaaaattgatttttgcatgtggcatgatgcaccagttcattgaggtaggggttgaagttatttcccatttttttcaataccatttattaaaaatattttcctctttctgttgaatttgcttggtgcctttgttgaaagtcatttcactgatatatgtagttctatttctatattcttgatcatgtttcatttgtctattcttttactaatagcacactgtctcaattattgtagctttatagtaagtcttgctacaaagtcttactacaggacaaagcttgtaggatttttgaatgggatggcattgcatctatacctttatcagggaaagagggaaggagggaggaggatcatcttaacaatattgacacttcaaatccatgaacatggtatatatttccatttaattaggtctttaatttctctcagctatgttgtatagttttcagtgtagagaggtcatgtatatttctcattaaattgtccctacatatttgatgttttctaatgttattgtaaatagtatttttaaaattgtatcttctaattgttcatttctagtttacagaaaaatgaaaaactatgtttttatgtattctatatgcttttgaaaagtaagaggtgcaaagtgctctattcttacactatattgtgtgagaatataagtcgaaaccactctgcataagttcaggcttccattctcttcagtttgtaggttgagagaacccatccagaaacagtaaacattggtgtctgcccaagtctggtcctgggtggttcattcattcatttacataacaaatatttattaactgtctgctatatgcaaggcactgacctatggactaaggatgcagcaatgaacaaggcatatatgattcctgagttaatgggccctattctaatacatgatattttacaggtctgataaaagccaacaaggagaaatacaaaagcactaagagaaagcttatagtagggaagcttcgcctaatctgaaggtcaaggaaggctttctttttttcggaaagtgatatttagagagatgaatagattaataggatgagtagaagttatctaggtaacaaggaaagtaaaaaagaaattgtcaggcagaggaaatagcatgtgtaaagatctttttaaaaaataaaaggtgtgactcaagcaatttaaaagggctagggaggctagaaacagaaaataaatagatgaaactaataaggcagggagagccttgtaaatcacacttaaaattctggattttgttctaaatacccttgtacttaggagctattaaaatattttaaacaaggcagtgacaagatatttgaattattaagcttactctggctgctatatggagaattgatttatgagggttataaatagaaataggaagataagataggagactatggcaatattcctggtaagaaatggaagaagagctggcttggattaaaggggaggcagtggatgtagaaataaatggatgaattatagatatatttaggaaatgggttcaataagacttaataatggaataggtggaatataaatttcatgagggcagggggtgttttgtttattattatattcctaggtgtctgaaaatattgttgtgttgcctggcaagtggtagatcttcagtgaaatattattaactgaataaatacaatggataaatggggagcagggattaagagtgattcctgggtttccacattaaggaactggatggacaaagctaccatttgatgagaatggaagactaaagaatgatagatttaagagaaatcgagttgagttccagccatgttcatttgaaggatctgagaaacagtgcagatattcagtgtgtgattagacatatggtcatcattcttttttttttttgagatggagtctcgctctgtcacccaggctggagtgcagtggccctatctctgctcactgcaatctctgcctcccaggttcaagtgattcttctgcctcagcctcctgagtagctgggactacaggcgtgcaccaccacgcctggctaatttttgtatttttagtacaagacagcatttcaccatattggccaggctggtctcgaactctgatctgcccgcctcggcctcccaaagtgtggggattacaggcgtgagccaccgcgcccagccggttaccattcttttactctgagttcttccattgtgatcatctagtcagatgggtagatccttataaggctgagcataataagcttcctgatagctctacactggtatgttttggggttcatggctgagctacttttgtgttttatttatcttcctgatctctttttcactgtaagaaacatccagcacccagggaaatttgctgtctaattcatactccactcttcagactagtcctagtgttcagttttgttttgttttttttctgtgtctggaattctattaaaatgtgtcaggctgttttaatttttgttgtttaattttctttcacatgattatatgtgctccatggatttttttgtttgtttgttttttgtttttgtttttgtttaagcggggtcttgctcttgtcgcgcaggctggagtgcaatggcttgatctcggctcactgcaacctccgcctcccgggttcaagtgattcttctgtctcagcctcccaagtagctgggactacaggcacatgccaccacacccggctaatttttgtatttttagtagagacgggtttcatcatattggtcaggctggtctcaaactcctgaccctggtgatctgcccacctcggcctcccaaagtgctgggattacaggcgtgagccaccgcacccggaggaaatttttaacctcagtttttcttcaccatctgtaaaactgcatagaaggaatgtttaggataaaagatgcataacaatcataacaaaattgttgggttttaatgttatgagtacacttggaggattctatgtccacacataccttaaacatcctatagagtccttagcattttaaagttgaaaccaacagtatgaatgatggtagaattttcccccccaggaagttagaactgttccatatcttgatagagggatgggttataaggatgtacacattttccaaaactcattgaacttaagagtcttgcatgtgactgtatataaattatactttaattgaaaataaatttaagaaaataaaattggctgggcgtggtggctcacgcctgtaatcccagtgctttgggaggccgaggtgggtgaatcatctgaggtcaggagttcgagaccagcctggccaacatggtgaaactctgtctccactaaaaatacaaaaattagctgggcatggtggcggacacctataatcccagctactcgggaggctgaggcatgagaatcgcttgaacccaggaggtggaggttgcagtgagccaagatcatgccattgctctccagcctgggcaacatgaacgaaatgccatcttaaaaaaaaaaaattaaaagaaaagaaaattagcctcccccaccctcactatacctcagactcacccctgaaagatcactactattcatccctggttatgtacacttacaaacattttctgtgtgtatgcgaatgtatgtgtggggttttctttgcacaacaggatcattttacagtatatatactgttgtgcaacttgctctttccacttaatatctcaaggaatcttttctttgaatctttatagccatgtacctcaatcttagtagttttctttattttatttttgaataggaaatacatttacatggttttaaaaatcaaaacaatatactatgtatatattgagaagtctgacttccatccctatcctactcctattccacccttgcttcctcctgtcccctgtaggtaaacattttataactttattaagcatcctgtcagcatttcttatgcaaatatgtacatatatttttatttccccattttttttacaaaaagataaaatactatacaccactttatatcttcctttcttcacattatatcctttaaaaatatttccatattggccgggcgcggtggctcacgcctgtaatcgcagcactttgggaggccgaggcgggaggatcacgaggtcaggagatcgagaccatcctggctaacacggtgaaaccccgtctgtactaaaaatacaaaaaaaaaaattagccaggcgtgatggcgggcgcctgtagtcccagctactctggaggctgaggcaggagaatggcgtgaacctgggaggcggagcttgcagtgagccgagatcgtgccactgcactccagcctgggcgacagagcaagactgcaactcaaaaaaacaaacaaacaaacaaaaaagaacttccatattaatatatagaaagctgttttttttaacagttgcttagcattcctttggattattaaccagtctcataaatgagcgctattgaatagccctgtacctacatcagtttttacatatgcagtatatctttgggatgaattcccagaaatggaattgaaattgctgggtcaaagaggaaataggtgtaattttcttaggtattttcacaagaagtgttaattctaactttctgttttgaaatgatttcaaattttcaaaggagttgcaagaattgtacaaagaactgtatctccttcacccggatgcaccgggtgaattatatgtattatataattgtatctgtaggccaggtgcagtggctcactcctgtaatcccagcactttgggaggctgaggcaggtggattacttgaggccaggagttcaagaccagcctggccaacatgataaaactccatctctactaaaaatacaaaaattagccaggcctggtaccccatgcctaagggtgaggcatgagaaatgcttgaacctgggaggcggaggttgcagtgagccgagatcgcaccactgcactccagcctgggcgacagagcaagactctgtctcaaaaaaaaaaaaaaaaaaagtaaaaaagttttttaaaaagatgtatctatatatacatatttacatacacacccaagtgtgtatgtatatatgtttgtgtgtatgtacacaaacacattatttttatatgatatgatttttttatgacatgattatttttatgacatttgagagtaagttgtagaaattatgtttctttattcctaaatacctcattgtgtatttcctaacaaggacattcttttatataattaaattttaataataaaaatcagaaaatttaacatcaatgcaatataattatttagcctatagtccatatttaaattctaccataccttatagtatattttactatacctcatagtaattttttttagtccaaaatatcacacattgcatttagttgccatgtctcttttttttttttttttttgagacagggtctcactctttcgcccaggctggaatgcagtggtatgatcttggctcactgcaacctccgcctcccaggttcaaatgattctcctgccttagcctcctgagtagctgggactacaggcatgtgccaccacactcccaccacacccagctaatttttgtatttttagtagagacaaggtttcactatgttggccaggctagtcttgaactcctgacctcaagtgatctgcccacctcagctaagtgctgggattacaggcgtgagccaccatgtgtggcctagttgccatgtctctttaatctactttaatctgaaacagttcctcagccttgtttgtttatatgaaactgacatttgtaaagactagaagccatttgtcttgtataatgcctttaatttatatttgttttatgtttcctcgtgattttatatatagagtttgtttgtttgtttgtctgtttgtttgttttgagatggagtctcattcttgtcacccaggctggaatgcagtggcgcagtctcggctcactgcaacttctgcctcccaggttcaagcaattctcctgcctcagcctcctgagtagctgggattacagatgcctgccaccatgcctggctaatttttgtacttttagtagaaacggggttttgccatgttgcccaggatggtctccaactcctgacctcaggtgatccgcccgccttggcctcccaaagtgccgggattacaggcatgagccaccgtgcccggacctcatgattgtatttatttatttatttaatattattattattatttttttttttttgagatggggtcttgctctgtcacccaggctggtgtgcagtggtgcgatatcggctcactgcaaccgctgcctcccagattcaagcaattctcctacctcagcctcccaagtagctgggattacaggcatgtgccaccacacccggctaatttttttgtattttttttagtagagacgaggtttcaccatattggccaggctggtctcgaactcctgaccttgtgatccacccaccttgacctcccaaagtgttgggattacaggcgtgagccaccacacccagccttatgattgtatttagactagacatttttttggtagtatattatttagccattgctgtgtaacaaattatcccaaaacttagtggcttaaaagaagcatttattatctcataaattttgtggatcaggactgggtatagctttgctgagtgcctctgcctcaaagtcttacaaggcagcaattaaagtgtcacctaaggctattgtcttatctgaagggtcaacagaggatggatccgcttctaatctctctcacatagttaatggcaaaattaagttccttgtggattgttagactaagggttccagttccttgctggttgttagcttgaggtctacctcagttccttgccatgtggacctccatagggcaaccagcttctgttagagcaagtaaaggagagtgccagagagggcaaatgtgatgaaagccacaatctttttataaacctaattttgaaagtgacatacaaggctaggcatggtggctcaaacctgtaattccagcactctgagaggccaaggagggtggactgcttgagcccaggagttcaagaccagcctgggtaacatgacaaaaccctgcctctactaaaaatacaaaaattagctggtctggtggtgcatgcctatagtcccagctactcaggaggctgaggccagagaattgcttgaacccaggaggcggaggttacagtgagccgagatcacaccactccactccagcctaggccacagaatgaaaccctgtcaagaaagaaaggaaggaacaagggagggagggaggaaggaagggaggtagggaggcagggaaagaccgagaaagtgacataccatcatttttgctgtagtttgttcattagaagcaaaatcacttggtccagcccacactctggggagatgattttctaactccatttgtaataacttattctacttttattagttggcattatacagtaagaaagagctttcttttctcttcttatttattcatatatggctcatgtgttttttccaatgagttatattctattactaacattttttattttgacctcaaattgttttagatgttaccaataagaacctcttcaagctggttcttgtgtccttttgccataactctctcattttcttgaaccctttcttactttctgatataagaaaatattagagactcatactttccttgttccagttctgagatgaaccatttatccaaaagccttgcttcattttagtagggaatagtatttagaaactaagatctgggtgtgaggtatgctcactgctaatgggctgtcactgtttctaggccttgtcagcagacggagctaggaaaaacacacataaacacacccatatttatatttgtacacacactccctcaaaatcgtgagttcatattgatacctccagttctggttcttcctagccttccccctttccatctttgtatttttattttccaacagtaagaaccctggctcccagtgctatgaatatatttactcatttgctccatccactgcactccagcctaggccacagaatgaaaccctgtcaagaaagaaaggaaggaatgagggagggagggagagaggaagagagagaaggaagaaggaagggagggagggaaaactgagaaagtaacataccatcatttttgctgtagtttgttcataagaagcaaaatcacttggtccagcccacactctggggagatgattttctaactccatttgtaataatttattccacttttattagttggcattatacagtaagaaagagctgctgaagatttgcttgcaattggttgtctttaaactgagggtatattgtcaaagtactgtgctgaaaagttacctgtagtatagttatgtgattcattaaaataaagtttgtttctattatgtgcagttttagagttttgccacactctggttgattagtatattttctgttgcttttttgttttgttttgttttgttttgtttttgagatagggtctcgctatgtcacccaggctggagtccagtggtacaatcacagctcactgcagcctcaacctcgtgcacttaagcgatcctcccacctcagcctcccaaatagctggggctgcaagtgcacaccaccatgactggctaattttttaattatttatttatttatttatttattttagagatggggtctcactatgtttccccaggctgaccctgaactcctggggtcaagtgatcctcctgccttagcctccaagtgctggtattacaggcataagccaccacacctagcctagtattcttttttgaatatgtaaaacattaacataaagtcaaaactattaaaaaaaggtgtactcagaaaattgtcattcctcccctataccttctgcctcattcacaccacactctgtagataatcgatttcattagtttgtggtttatcctcactgtgtttctttttgcaaaacgcaaaaacaaaacctatacatatttatattttcttatgtcctcttctttcttacacaaaaggtaacacactatgtaggtagtcctggctttgaacagtttcactataaaaatatttgttactacagcttaaataacataagtctcctaaaaataattcaaattttagttaccatggtatattaactttgagtagttccataaaggacaaacttggctgctagcccttcagtccacagagcactttgaaaataacagatgagcaaaataatgtggccaatcacatgacttctttcaaagtatgtcagtgatcagtcactgtgtgcctataatttagttcatgcacagacagcaaagcatgtagttgtgttgccttccagtgataaacccacataacattttagaaaaatgtattaagaattggccagcaaagataaaagtgcagcaaagaaacaaaagtgataatgttttcagtgaaatttgaattgaacataaatggagttatagaagaaatagctgaccatgggaatgttcacactgctactttcaagaatctctagaagggcagctaaaggagcttagtgaaggtgaatttattgacatgaatgagaaaagtaattgtgatgaaaaggatgaagatgtcccagagaaagtaatgccagcaaaaacttcacattaaaggaactctcagatatttcaaagcattgaaacctccaagaataaataaaatgttggaagttgatccaaacttagaaaggagtatggcaacttgtcaagatgaagaaaaggtgcttattcctttttatttatttatttagagacagagtttcactcttgttgcccaggctggagtgcaatggcatgatctcagctcaccgcaacctccacctcctggattcaggcagttctcctgcctcagcctcccaagtagctgagattacaggcatgtgccaccacgcccggctaattttgtatttttagtagagacagggtttctccatgttggtcaggctggtctcgaacccccaacctcaggtgatctgcccacctcggcctcccaaaacactgggattacaggcatgagccaccatgctccacctgcttattccatattatatgttataggatgaaaagaggccaaactaatcttgacatgttttttacaaggaaataatcctccatggttctaatttttttttttttttttttttttttttttgagacagagtcgcgctctgtcacccaggctggagtgcagtggcacgatcttggctcactgctagcaccgcctcccgggttcacgccattctcctgcctcagcctcccgagtagctgggactacaggcgccggccaccacgcctggctaattttttaaaaaatatttttagtagagacggggtttcaccgtgttagccaggatggtctcgatctcctgacctcgtgatccgcccgcctcggcctcccaaagtgctgggattacaggcttgagccactgcgcccggtgggtctaatgttttaaattacactgtgttaaataaatattagtttgttggttttttttttagtttttttatttctctacaaatttacaaccaataagagtttttaatgctttgacaaaaaatgttaaaggtcatagtacaatcgcatttcttcccattgattattaacatcactttacatagtttcatcttgcattagcaattttgtgtgtgtgtttgtggttttaaggagcggagagtttaataggcaagaaggaagggagaagacagaaggaaggagctcccccttacagagacagagggagcggggctccaaaagaggaggtccccatctaccgcggataccagccaggtatatatgcagaggctggtggaggtgatgtctgatttgcatagggctcaggggattggtttgaccaggcatatcattcacgtagcccgagaaaaagctggccctcccaccccagccttttaatatgcaaacgtagggcgccatggatgttctaaacacgtggagatatgtggggggcagccatgtggccaggaacttgtggggcaagggcaagaaggctgtgggaatcgccaagttgaatggacctagtttctaatggcctgcatttgcatatcaaaggttgctggcctggctcctagagccggggctttaaaagaaacttttccggagatgctttaaaaaatgaaaacttcccaaggaccccttttcctgtctatctgcataaaataatttcttttattatttatttatttatttatttatttatttatttatttatttatttatttattttgagacggagtctcgctctgtcgcccaggctggagtgcagtggcgcgatctcagctcactgcaagctccgcctctcgggttcatgccattctcctgcctcagcctcccgagtagctgggactacaggcgcccaccaccacgtccggctaattttttgtattttcagtagagacgggatttcaccgtgttagccaggatggtctccatctcctgacctcctgatccgcccgcctcggcctcctaaagtgctgggattacagaataatttcttaataactcctaccacattcctccctgtggcgatatcaaactaactgctgttaggaggctttgggcgaccattgcttctggctacttcctgctgaaaaggggcgtctaatggagaacagcagctagggctcctcctggggttgatctaagggtcctcggaagaatggcgtccatgtgtggttcagtttacagcaccgtttggagtttgattgcttctaggcgagaagaaacaattcaagttatagtattgagtatacagagtccaaatatcaatacaagacatataagcaagagagtgcttaataaaggggttaaccaattccataaagaagactggaagtaattaaagagggattgtagccactcggggctgaagcccacattttccctgagcctgtcaataattttgatttgatttttaagtccctgtagatttgcctcttctttactacaggtgttaatcccaaagaagcatgtttcatttaaaaatgcattactggccaggcgtggtggctcgcgcctgtaatcccagcactttgggaggctgaggcgggagcatcatgaggtcaggagtttgagaccagcctggcctacatggcaaaaccccatctctactaaaaatacaaaaaattagccatcgtggtagtgggcgcctgtaatcccagctaattgggaggctgaggcaggagaatcgcttgaacccgggaggcagaggttgcagtgagccgagatcgcaccactgcactccagcctgggcaacagagcaaaactccatctcaaaacaaaacaaacaaacaaacaaacaaaaactgcattactaaatccaataaaaagtcctagtagactcagtgatagtaaaactttcatgcttcctttttgccagtaactattatccctgctataaggatactaattaagcaaaatacgacagcaatggaaactctgtccaatatttcagttagaaggtgctaccatggataaccctattgcaaatagtagagtgaggaaagcagttcccacaaatgtggtgtggtaggtaatttccatctaaaattttacttgccaacatatagaattcccctctgtgggcctacgaagttccttggttttattttcccaaacaaagaaacctccgggttacaggtaccttacttactttcattacctggcacaatttgcaaaataattgcccagaactagcatattgattcacattttcacattacccatccctttttcccccccaccaagctgcagaagatcaccacttgattcacaggaataagcagggccagggttagtctaaaatgtaggcaaaaagcttaaaaacaattaatgagactagggtttaatgacaaatgtatgataagctttggagcaaaatttttctctccagtcctcatttttggtaaaaactaattatgaatgaactttaatcttatacttggcctgattatttgcatgaagtgcagcaagaatggttatttctacataggacttttggattggctttgatgaaacactgttccacaaggaatttcagattagacttttaaagctgagcccagacatgggtttgtatcctctaatacctgtgagttgggttatcctctcctcttgaggtcccaagataaactcagagcttccagacctgttagaaagtgacattcttcactgaccacaggttaggaaccctgtgtggggactgtgtagacaaggtgtgaggccagttctccccaaggggcttttattggctctgcatgtcaagcttgattccttaaagggaaacacaccctttcagttaaagccttggcaaaataaccggtttttccaattgtgttctgttgacaaagaaaaatggattcttgctgcactgatgcgaacaactatattgccgtaagttaagagtacttacagatagtctccaaattttagaggaaccaggcagagaaaaatgaacatgctccaaattttgttcacagtagtataccttacttgattattaaaggccataaatagtttaaaataagtttcctttcccagtccatgcaccaaaatgatacggctctgatgagtggaggaacaacagggttcctggtcctcatgctggtttagataaaatgacacagacacatgtggagtggttttaaggagtggagagtttaataagcaagaaggaagggagaagagagaaggaagacgctcccccttgcagagacggagcgggggttccaaagctgaaagaggaggtcccccacattaacaatttttaaaataccgtacaactgcagaaaatgaggactgcctgtacatactgtttgacactttgtttttttttttaacttatcaactttattttgtttgtttgttttggttttgggtttttgtttgtttgtttgttttggagacgagtctcactctgtcagccaggctggagtgcagtggcacaatcccagctcactgcaacctccacctctcgggttcaagcaattctactgcctcagcctcccgagtagctgggattacaggtattcgccaccacatccagctattggttttggtttttgagacagggtcttgctgtgtcacacaggctggagtgcagtggtgtgatctcagctcactgcaacctctgcctcccaggctcaagtgatcctcccacctcagccttccaagtagctgggactacaggcatgcacaccatgcgcagctaattttttctattttttgtggagacggggtctcactatgttgcttaggttggtcacaaattcacagcctcaagcagtcctcctgcctcaccctcccaaagtgctgggattacaggcatgagccaccacatccagccttaccagctatattgaagtataatttatataacataaaatttgccttttaaaattatacagtgcaatgcattttgacaattgtttacatctgtgtaaccaccatgcaatcaaaatatagaacatttctataaccttcaaaagttccctcatgcccctttgcaatcaattcactacttctccagctccaggcaacaactggtctgcttcctgtcactataaattagtgttgcctctttcagaatttcatctaaatggaatcctataacatatactattttgtatccatcttcttttactccaaagttcttgaaattcattcatgttcctgtgtgtatcagcagcgtgttccatttgattgttgagcagtattgcattgtgtggatatatcacaatgtgttcattcattcaactgttggtggacatttgagttgtgtccagtttagtgctattctgaattaaagtgatgtgaacaatcatgtacaagtatttttgtaggcatattttttttatttctcttggataaataccccaaaacagaattgttttgggggtcatatgaaatgggaagtatatgcttaactttataagaagctgccaaactatttttcaaaatggtaatatcactttacattttcatgagcaatgcataaagcgttccgcttgctacattttctcaccaatgcttcctattgtcaattttttaaattttagcaattctagtgggtgtgtgatactatctcattgaagtttcaactgtttttccctgttgactagagacactgagcaacttttcatgtgttgtctatttgtatatcttcttgaagcattcgttcatctttaactgagctgaacgccttcttaaaattgagctatgggagttttaaaatatatccttgtagctgggcgtgatggcaggtgcctgtaatcccagctactcaggaggctgagacaggagaatcgcttgaacccaggaggcggaggttgcagtgagccgagactgcaccactgcactccagcctgggcaacagagtgagacttcatctaaaaaataataattatacatgtaattatatatgatttttatatatgtaatatatatattcttgatgtgagctctttgtcacatacatattttgtggatattttatcccagactatgacttgtcttttcattttcttagttgtgtcttttgaagagcagaagatgtaattttgataaagcccaatttattttttcttttatagtttgtatttcttatgtcctattcaaaaactccttgcctactgaaaacttatgatgattttctcctatattttcttttagaagttttatagttttaccatttataatttggtctatgaatccttttgagttgatgtttatgtatggtgtatggtgtgaggtaacaatgaagattcatatttttttccaaaggaatatccaattgtctctttggaaaaatatgctgagaaggctatcttttccccaccaaataatcttagcaccttaatcaaaaatcatttggccatggacatatgtaggtgtgggttttttctgggctctctgtgttagatggatagatagacagatacagatatataactgtgtttacacatatgtaactgtaaacacagttatatatctatatatccaccaacagttgaatgagaataaactattgttataagcatatatacacattgtatatatatgtgtacatatacatattgcatatgtatgtatacatatatacacacaaagtatatatatgtatgtatacatatatacacacttaaagtaatggcctccagttcgatccaagttgctgcaaaggacattatttcatgccttttcgtggctgagtaatattccatggtgtatatatatatatgtgtgtgtgtatatatatgtattatgtatatatatatgtgtgtgtgtgtgtgtgtgtgtatatatatatatgtgtatatatatataccacattttctttatccactcattagtcgatggggacttaggttggtttcacatttttgcaattgtgaattgtgctgctataaacatatgtgtccaagtgtctttttcatataattacttattttcctttgggtagatacccaatagtgggattgctggattgaatggtagatctgttttttgctctttagagaatctccatactgttttccatagaggttgtactaatttatattcccagcagcaatgtgtaagtgttctcttttccccacatccacaccaacatctattgttttttgactttttaataatggccattcttgcaggaccaaggtggtagctcgttgtggttttaatttgcattttcctgatgattagcgatgttgagcattttttcatatgtttgtgggccatttgtataccttcttttgagaaatggctatttgtgtcctttgcctactttttaatgggattgtgttttatttttcttggtgatttgttagttccttgtagattctggatactagtcctttgtcagatgtgtactttgcaaagataatattttggatgttatatttccattataatttagttcaaagtattttctaatacaccttgcaatttcttctttgacccatggattattttaaagtttgttattttgtttgtttattttgagacagagtttcactttttttgcccaggctggagtgcagtggcacaatcccggctcccagattcaagcgattctcctgcctcagcctcccaagtagctgggattacaggtgcccaccaccacacccagctaatttttttttcttttttttttgagacagagttttgctcttgttgcccaggctggagtgcaatggcacgatctcggctcactgcaacctctgcctcctgggttccagcaattctcctgcctcaacctcctgagtagctgggattccaggcatatgccaccacgccaggctaattttgtatttttaatagagacggggtttcttcatgttggtcaggcgggtcttgaactcccgacctcaggtgatctgcccgccttggcctcccaaaatgctgggattacaggcatgagccactgcacccagtccaattttttgtatttttagtagagatggggtttcatcatgttggccaggctggtcttgaactcctgacctcaggtgatccgcctgcctcggcctcccaaagtgcagggattacaggtatgagccaccatgaccagcctaaagtgtattgtttagtcaccaaatatgtaagtattacccaaatatatttgtcactgatttctaatttaattgtattgtgatccaaaaatatacattgtatagtttctattcttttaaattcgttaacatttcttttatggcacagaatatggtctatcttggtgagtgttgcttacacacaactgtgtaactgaaaactgtgtattctgcttctcgtggttgttgtatcctataattgtcaactagatcaagttagtaagagtgttgttcagtgatcttttcttcttcagtgtttactgtatttgctaatcccatccagtgaagtttccatttcatatattgtatttttcacttttagaagttccatttgactctttcatttccatcctcaattatcttcatatttttctttaaatttttgagcacatttataatggaggttttaaagtccttgtctgctaattttgtcacctctgtaattcctatgatgattttcttcctggcttggggtcataatttgttgcttatttgcatgtctaataatgtttttattggacagcagacattgtaaatgttatatttttgagtgtttggattttgtctttctttaagaactattgcagtttgttttggaaggctattatgttttttgcagatcaggttgatcttttcaaggcttgtttttaagctttgttaggacaggtctgtagtaacttttgccttgggctaatttagacctaccacttaattctgacttttttgattaatctgagtgttcagcagggtctctttattatggctaaatgaaattcaaacattttccagccctatgtgaccatcaagaattcagctaatagctccctggcagttcttcgcccagctgcagaaaagtgtcagtgcactctatgtatgctcagattattatttagccaaagacttggggatccatattaatattcctggagttctttgtgtagctccattctctttagtactctatcccataaattctggctgcctcaatctcctaatctccccaaactctaatatctattcctcaactcagcaaaaccatggtgttattcttggatttcccctttcctgccccacagtctgaaagttgtctccaggcaaaaaaaatggagatcctagtttgcggatcctcatttccttctccttttttttttttttttttttttttttttgagatggagtctcgctctgtcacccaggctggagtgacgtggcgtgatctcggcttactagaaactccggctcccgggttcatgccattctcctgcctcagcctcccgagtagctgggactacaggtgcctgccaccatgcccggctaattttttgtattttgtttagtagagacggggtttcaccgtgttagccaggatggtctggatgacctcgtgatctgctcacctcggcctccaaaagtgctgggattacaggcatgagccaccgcgcccggcctgcttctcttctcttatgggttagaatcctgcactgtcttttgaacaaatgtctaaaagcttttatcacacattttgatccacttcccagttgttatagtggtatatctggtttcacatgactgaaaggaaaagttttcaccttgctttttgtactaataatatatcctggaaatcattctatataaatttatagaaatcttcatttttaaaatagcttcataaaactccattgtaaaaaccaggtgcagtggctcatgcttgtaatcccacactttgggaggccaaggcgggtggatcacctgaggtcaggagttcaaggccagcctggccaacatggtgaaactccgtctctactaaaaatacaaaaattagctgggtgtggtggtgggcgcctgtagtcccagctacttggaaggctgaggcaggagaattgcttgatttcaggaggcggagattgcagtgagctgagattgcgccactgcactccagcctgggctacagagcgagactccgtctaaaaaaaaaaaaaagcaaaaaaaaaaactccattgtatgtgcacatatcattatctgttcaacccatctatgacttgtcatttaggtagtttccatccaatatttttgcaatataaaaaatgctaatgaagaacctgagatatatatatatctatatatatagatatatatgtttgttgttgttgttgttatttttgaagtatgtacgtataataaattcctaatagtgtgattgctgcatcataaggtaaaggcatatgtagttttgttaaatatagctattccccatcttgcattcctacaaatagatgagaatgtccattgtcccatagtctcctttgcagagtatattgtcaagctttttaattgttgccaacctgatgggtaaaaagatatctccaaataattttaattaaaatttctcttattatgaatgaggttaaatagtttttcatatgtttaaaagccagtttatatctttttgtttttttagagacaggaatcttgttctgttgcccaggccaaattgcagtgatgcagtcatagctcactgtagcctcgcactcctgggctcaagcaatcctcctaccttagcctcccaagtagctaggactacagatggatgccaccatgtccagctaatttttttatttttttgtagagatgtgaggtctcactatgttgcccaggcttgtcttgaactactggcttcaagtgatcctcccacctcagcctcccaaagtgctaagattacagccatgaaccaccacaaatgaccctatatatttttttgaattgtctgttcatgtcttattttcatttttctagtagttttttttttaagtgttttagcctaaatttgtaaaaagtttaggggatatatgaagggactctaaatgtttatgaagaaatttaattaaaagataaaaataaaaatataagctttatttttcaacatgagctccatcaagttcaaggcacttttgtaagcaatgatactagccatttagttcacccctaaagaactgagagtcctgggaatttagccatgtcaatgcagtattttttatattggttactgaagaaaaaatgggtgccctttaaagttgtaagattaggaacaaaaacaagtcagaagaagccaaatcagcactgaaaggtgggcacttaatgattacccaagaaaactctcaccaaattgcccttgcttcatgagaggaatgagcgggagcattgtcgtggtcaggaaggattctggggaagttttcccaggcattttttctgctgaagctttggtaactttctcaaaacactctcataataatcagatcttatcactctttggccctccaggaagtcaaccagcaaaatgctttgaacatcccaaaaaagcgcttgccatgacatttgctcttgaccagtctgcttttgcattggtcaaatgccaccacttccacctcttgtgctttgttttcaggatcagactggtaaagtcatgtttcatctcttgttacagtttttttttttttaagaaacccttcaggatcttgatcacatttgtttaaaatttcaactgaggctgggcccagtggctcatgcctgtaatcccagcactttgggaggccgaggcgggcaaatcacgaggtcaggatttcgagtccatcctggctaacatggtgaaaccccatctctactaaaaatacaaaaaattagccgggcatggtggcaggcacctgtagtcccagctactcgggagggtgaggcaggagaacggcatgaacccaggagacggagcttgcagtgagctgatatcatgccactgcactccagcctgggcaacagagtgagactccagctcaaaaaaaaaatcaagtgaaaactctggtcttaaactgcagctgatctattttatttttattttttttcagacacagccttgctctgttacccaggctggagtgcagtggcaccatcatggctcaatgcagccttggcctcgtgagctcaagcaatcttcccacctcaggctcccaagtagctgggactacaggcacatgctaccatgcctggataatttttttgcagctaatctagatgtaatggttttggcacccatctaatggaaagtttgctcaactttaatttttcagtcagaattgtgtaagctgaaccgagatgtctatggtgttggctattgtttctgctgttaattgtaggtcttctttaattagagcacagacaagatcattttttttcctcccaaattgatgtagatggtcttttgctgtgggcttcatcttcaacattgtctcatcccttcttaaaacaagctagctacttgtaaactgccgttttctttggagcattgtctccataaacttttcacaaaacatcagtgatttcaccgttcttccactcaagcttcatcataaatttgatgtctgttcttgtttccattttagcagaattcatgttactctgataggggctcttttcaaactgttatcttattcttcttagtgcctcaaactagatcctattcagacatggtataacaagttagtatgggtttattttggtgcaagaaatattttgaaatccacacatttttttcataatatgcattttccatgaagtttttgaaaactccttgtattaggaatattagtcctttgtccagtaaacagactgcaaatattttctcacagctcatcatttaccttttggcatttttttgcaatgcaatttttttccctttgtttttgttttttgtgtaatgaatcaatgttttcttttttttttttttttagaccaagtctcactctgtcacacaggctggagtacaatggtgcaatctcagctcactgcaacctctgcctcccaggttcaagtgattctcatctctcagcctcccaagtagctgggattacaggcacatgccaccatgcctggctaatttttgtatttttagtagagatggggtttcaccatgttggccaggctggtctcgaactcttgacctcaagtgatccactcacctcggcctcccacagtgctgggattagagacgtaagccactgcccccggccaaatcaacgttttcttatattgcatttaggttttaagtcatagttagaaagcctttccccacacctaggttatagaaacattcattacttttttcttccagtgctagtacttgcatggtttttggtttccacatttagatccctgatctaattggagtttattcttttgtgtgctgagatatggatctgattatatcttttttcccaaatggctatccagttgtcccaatgccatttattaagcacttcatctttgtcccagtgatttgagatagcatctttatcatgtaccaaacttctatagtgccagaagatttttattttttttagacagggtctggctctgttgcccaggctggagtgtagtggcacaatcccagctcgctgcaacctccgcctcacatgctcaagtgcccgcacctcagcctctcaagtagctgggactacaggcacatgccaccacaccaggctgatttttatatttttttgtagaatgagatttcaccatgttgcccaggctggtctcaaactcctgagctcaagaaatccgcccacctcagcctcccaaaatgctaggattacaagcatgagccaccacacccggctgccagaaaattttaatgatcagaaaaccacaattctttcttcctctgttatatgttgaagtaaaatacttcatttagaaaactaagccgggcacagtggctcacacctgtaatcccagcactttgggaggttgaggcaggcagatcacctgaggttaggagtttgagaccagcctggccaacatggtgaaaccctgtctctgctaaaaatagaaaaatttgctgggcatggtggcgggtgcctgtaattccagctacttgggaggatgaggtaggagaattgcctgaacctgggaggcagaggttgtggtgagccgagaccacgccattgcaccccagcctgggcaacaagagcaacggtaaactccatctcaaaaaaaaaaaaaaaaaaagaaagaaaaaagaaataactcagccatacaaggctacccatttggtgagaactaataataagttagatagcaaggtaatagcaaaatgtgggtgcaaaattaaagcaagttatttctgaggagaatgtaggtctcatggaagattttcatgtggacaaatttagtaaattttttgcaggtagtttcctgacatatttaacatttgtgatatagtaaacaataagaaggtactaaaggctgggcgcggtggctcacgcctgtaatcccagcactttgggaggccgaggtgggcggatcacaaggtcaggagatcaagaccatcctggctaacacggtgaaaccccgtctctactaaaaatataaaaagttagctgggcgtggtggcgggtgcctgtagtcccagctactcgggaggctgaggcaggagaatggcgtgaacccgggaggcggaacttgcagtgagccaagatcaagccactgcactccagcctgggcaacagagcgagactccatctcaaaaataataataataataataaggtactaatatgatccagactagaagagaatagcactaaaatgggagatggggtaaacctgtggttttttttaccttaggcttttgacttccaaaattattgtttttgctgggtgcggtgggtcactcctgtaatcccagcactttgggaggccaaggtgggaggattgcttgagcctaggagtttgagaccattctaggcaacaaagcaagaacctgtctctaaaaaaatttaaaaattagccagaaatggtggcacatgtctgtagtcccagctacttgggaggctgaggcaagaggattgcttgagccttttgaagttgaggcttcagtgagccatgatcaccccactgcactccagcttgggcaacagagcaagaccccatctcaaaaaataaaacaaaatagactgggcacgatggctcacgcctgtaatcccaccactttgggaggctgaggtggatggatcatgaggtaaagagatcgagaccatcctggccaacatggtgaaaccccgtttctactaaaaatataaaacttagctgggcgtggtggtgcacacctgtagtctcagctactcgggaggctgaggcaggagaatcgcttgaacccgggaggtggaggttgcagtgagccaagattgtgccactgcactccagcctggcgacagagtgagactctgtctctaaataaataaataaataaaacaaaataagtaaaataaaataaatgtttgtagttccaaaatattttgatgacataatttcttcttgttctaataaaactacatatgcattggtcctatgacctagtaatcacactattaggaatttatcataaatacacacctcaaaaattacaaaaatacatatataccagcttatttattacagcgttatttgtaattgcaaaaacattgtagatagaatggaggtcacataaaacttattcttaagattcagaccgggtgcaatggctcacgcctgtaatctcggcactttgggaagccgaggcaggcagaccacccgaggtcaggagtttgagaccagcctggccagcatggtgaaaccccatctgtaccaaaaatacaaaaattagctggtcgtcgtggcacgcctgtaatcccagctactcgggatgctgaggcgcgagaactgtttgaaccccggaggcagagactgtagtgatctgagatcatgccactacattccagtctgagcaacagagcaagacttcgtctcaaaaaaaaagatcatagatcatcttatcaaatcaaagtatgcaaaatattcaagtaaacttcagataaatatgaaggctaaaccattcagcttcttcaccaaacccttgaatgtcccacctgtctaaatggagatacatgtttgtttgatttattggttaactgtttttattccatttttcctcaaatgatcccataatttgaccttaggaagctgttcaaatagacacattaggttgaatggaaagactactcgatgatatttaggattttaagaggattttatgtattttttccttgtgtgcaataatttaatagcatcttgaataggattttctgatattactaaccctctgggaataatattaggtaattagacagttagctaatattaaaatatgtatcaggtaatatttattgagagtttcctctgtgccaagcaggatcaacttcataggcaggcgacctgtgcggggacacagggcttcatgcttagataggcccccttgctttgaaggcccctaccctttggttagggctctgctgttaccatcttgaaattcttaataatttttattttatttttttgagtcagggtcttgctctgtcgccctggctggagtgcagtggactcactacagtcttgaattcctgggctcaagcaatcctcccacttcagccttctgagtagttaggacgacaaacacacgccaccatgctcagataagttttttgtttgtttgtttttttgtttttgtttttgttttttgtagagatgggactgtccctatgttgctcaggctggtctcaaattcctggcctcaagtgatcctcccacctcagcctcccaaagtgctgggactacaggcatgagccactgtgcctggtcaatcatttttattaacaagcccaagccctcttttttttttttttttttttgagacagggtctccctctgttgtccaggctagagtgcagtggtgcgatcttaccttcactgcaacctctgcctcctgggttcaagtgattctcctggctcagcctccctagtagctggaattacaggcacccacccccatgcctggcaatttttttgtatttttagtagagatggggtttcaccatgttggcaaggctggtctcaaactcctgacctcaagtgatccacccaactcggcctcccaaagtgctgggattacaggtatgatccactgcgcccggcctccaagccccctatttttattttgcactgaccctacaagttacgtagctaggcttagttatgtttttagcaaggaaagtgtataatctcatgtaccttttgaaagattactcaggtctctgcatgtgaaatggaatttagggaatgcaagagagggagtaaaaataacagcgaggaagctatgatagcatttaaggttgctttgactcaggggtagcagtagatagggtaagtaattgatagtttcaaaatatattttgggagtagtaagcattggtatggattagtaatatactggatgtggggatgcagaaaaaaatattaaaaattacttctgaaattctggctggaatagaagtgccacttaccaggtaaggaaggttggagacataacatatttgagggtgtggtcaaaagatgagtttgacattatgctatgtcatataaaagacatataaaagactacctattttataattcctttttaataaaatattcagaaaaagcaaaactgtggttgcctgaggctgaagctaggaagattgactacagacaagcatgagggaaattttgggggtgatgagagttttctaaaactggattgtggggttggttgcattactgtataaatttattaaaaatccctgcatcgtataggggcactatattgtatgtagaaagctgtgaaaagattttaaaaatgattgacatgtctgtggttatatcaatgagtactattattattcccattttatacataaagaaaataaaagagaagttaaaaataaaagtttcatggttacatagctactaggtgtaatatccagtattggaatttgaatctttttgacactaagaccttactctcgatcatataatacattcactttctattttaaagttatattatagccgggcacagtggctcacacctgtaatcccagcactttgggaagccgaggcaggcagatcacgaggttgggagatcgagaccatcctggctaacacggtgaaaccccgtctccactaaaaatagaaaaaattagccaggcgtggtggcacgcacctgtatcccagctactagggaggctgaggcaggagaatcgcttgaacccagaaggcagagcttgcagtgagacgagatcgtgccactgcactccagcctgggtgacagagtgagacaccatctcaagaaaaaaaaaattatattataaatgctgcatctcattggtcagaagctctcttgaaattataaaacaaagaagaaaaaagataaagactgggaaattgtgttgaatcagtatataaatcctgtatactggtccttccatttcccctagaaataagtgatacaggccaggcgctgtggctcacacctgtaatcccagcactttgggaggcggaggctggcagatcacctgaggttgggagttcaagatcagcctgaccaacatggagaaacccccgtctctactaaaaatagaaaattagctgggcatggtggcacatgcctgtattcccagctactcgggaggctgaggcaggagaattgcttgaacccaagaggaggaggttgtggtgagccaagattatgccattgcactccagcctggggaacaagagtgaaactcaaaaaaaaaaaaaaaaagaaagaaaaagaaaaagaaagaaggaaggaaggaaggaaagaaagaaagaagtgatacaacaagttacagcatctttgtttattatccactgtgagttgtattaccacactttacttggctctttggcaaactatattatctcttcagatcactagggctaggaaggcccactggtaacttgaaggagtaaatgtatcttctaaaaaatgcttacttccagggagattggatccacacaagtgaatacatatatagtccttagtgtatgctatgattattttactatgtcagtagcataaagattgctatattaataagcattaagtgcctgctgtgctagacagtgaggatgcaagtggccaccaaaatagcatggtccctgccctcctggagcttctttttttcttcttcagtgggggaagcagatactttgcttatgcaaaaataattataaaatttaaagttgtgccaagttcaatggaaaaaatataaggtgttctgagagagcataacaaaggatcctggttttaactggggcctaatggaagacctctattaggaaataacatttaaactaagaccagacagacctgtagaaattagcaaagcaaagggagggaggaaaaagcagctttcctggcaaaggaacaatttgtgtgaaggccctgagacagggaagggctggggttctgaccaccctccaagtggtgcaatggaatatagtgagagagggagaagacatgagaacttggatactatgcaaaggatttggtattttaattcaagagcagtatgatgctactgaggagcagctggacaattgtgtgatccaattaaaattttaggaagatgaacctcgctattgtggagaatgcatacacaagggttctgttggttcatgaagaggtcttaagaaaactatgagctgggtgcagtagctcaggcctgtagtcccatctacttagaagtctgaggcgggaggatcccttgagcccaaggagctggaagttacagtgagctatgattattccactgtactccagcctggatgacagagcgagatcctgcctcagaaacaaaaaccaaaaaacaaacaacaacaaaaacaacaacaacgaaaatctcagaaaactacaggccttattatcaagaaaatgacaggccttattattgagaaaactacttacatttttaaaagctgattttcaaaaaccagattgtgaattaagtgatgctgaataggggaaaaaaagactgataaaccagtgtatctctgaataacccactagatcagtgcttgtcaaactttaatgtgttttcaaatcaccctgatgttttgttaaaatgtaagtcatgtctcagtaggtctagaggagggcatttctgcatttctaacaagctccccggtgatgcctagaccattggtcctcacactttgagtagcaagtgattgggctatactctttattctaaattctaaatgtattctatcttctaatgcctatcagccctcttgctggtctggctaattatcaaacttgagcatttaaaactgggggttttcagagattaattgaagtgttaaagacatggaaatataggtcacatatggcttttcatctcttccggaaatatcctatatatccttacttcttttctacctacctaacctatgtgcctaccccttcacttatgttcaaggttctattatacttcaaaaggactctatgcaatcaaagtgatgtccaagacaaatatacagaaatagtatgaggctctaacactttacatctaatggagtggtttgcatcattaattgaggcttactctgtgccaggcactttacctgccttcttcatttaataggataggagcaggaactcttagaggttcatttcttgttcaaggatatacatctcatctctggcttatatcacagtggactcttttattcactatcctaatcattataattttgtttggtgacaacaattctaaatgcagaaaagttaaggctctttattctgtgactaaaggctttgtattttctaaagatttgtggagctttgctgccattatttcaataattttataaagatcctaggtggtaaataggcctggctttttttctttttgaaatcttctccgtcttcttcttcattagcagtgcaacttcttgtggcatatggtacccaagatcttgggaaaaggattgatcaagtaaagggaaacgatagagagagtgtgctctacaactgagatcatgctccttgtgaaagacagggtagggaaatttcttattgctccctggttcttaagaaatgagagctaacaatgacatccagttttaaaagaaataaaatctgaattgtacttttaaattttataagccagagttaaaccaatagattgtaactcctgctaatttgatagtagctccagataatgaggaagtgacagggaatgctaatttcatttggtaagagataaaactgaaattattaatgtctccacggaaatgctaaatgcctccttacaagtagggtccggctaattgtctgtcttccaacaagccagatttgttggtgtttttccagacaatgttgtgtagttttcggtttggttcgatcccctttcttgtgatcaaagaaagtgattcaaatgtttaatgagtcttgatttggattggagacttgcagaacggctagcctcacagccccaaggctggctttccctaaggtaggtttcctatgcaccgatactggcaaggcgctttggctggaaactctggaaggaagccaaaggaaagtgaagttcctggcgctagcgcgtgtcctgctcagagagcccggcgctagctcattcttcgtgcagttattggctgggactctgtgtgccgctgtcggccaatgaagacgctggagatcgggcccctgcccgtcccctttctgcgccccgggatgaggcagagactgaacagccggcgagcaaatcaacggcatccagaaagccatgtcggactcggcgcccagcgcccaagcgctaacccgctgaaagtttctcagcgaaatctcagggacgatctggaccccgctgagaggaactgcttttgagtgagatggtcccagaggcctggaggagcggactggtaagcaccgggagggtagtgggagttttgcttctgcttggtgccttgaacaaggcttccacggtcattcactatgagatcccggaggaaagagagaagggtttcgctgtgggcaacgtggtcgcgaaccttggtttggatctcggtagcctctcagcccgcaggttccgggtggtgtctggagctagccgaagattctttgaggtgaaccgggagaccggagagatgtttgtgaacgaccgtctggatcgagaggagctgtgtgggacactgccctcttgcactgtaactctggagttggtagtggagaacccgctggagctgttcagcgtggaagtggtgatccaggacatcaacgacaacaatcctgctttccctacccaggaaatgaaattggagattagcgaggccgtggctccggggacgcgctttccgctcgagagcgcgcacgatcccgatgtgggaagcaactctttacaaacctatgagctgagccgaaatgaatactttgcgcttcgcgtgcagacgcgggaggacagcaccaagtacgcggagctggtgttggagcgcgccctggaccgagaacgggagcctagtctccagttagtgctgacggcgttggacggagggaccccagctctctccgccagcctgcctattcacatcaaggtgctggacgcgaatgacaatgcgcctgtcttcaaccagtccttgtaccgggcgcgcgtcctggaggatgcaccctccggcacgcgcgtggtacaagtccttgcaacggatctggatgaaggccccaacggtgaaattatttactccttcggcagccacaaccgcgccggcgtgcggcaactattcgccttagaccttgtaaccgggatgctgacaatcaagggtcggctggacttcgaggacaccaaactccatgagatttacatccaggccaaagacaagggcgccaatcccgaaggagcacattgcaaagtgttggtggaggttgtggatgtgaatgacaacgccccggagatcacagtcacctccgtgtacagcccagtacccgaggatgcccctctggggactgtcatcgctttgctcagtgtgactgacctggatgctggcgagaacgggctggtgacctgcgaagttccaccgggtctccctttcagccttacttcttccctcaagaattacttcactttgaaaaccagtgcagacctggatcgggagactgtgccagaatacaacctcagcatcaccgcccgagacgccggaaccccttccctctcagcccttacaatagtgcgtgttcaagtgtccgacatcaatgacaaccctccacaatcttctcaatcttcctacgacgtttacattgaagaaaacaacctccccggggctccaatactaaacctaagtgtctgggaccccgacgccccgcagaatgctcggctttctttctttctcttggagcaaggagctgaaaccgggctagtgggtcgctatttcacaataaatcgtgacaatggcatagtgtcatccttagtgcccctagactatgaggatcggcgggaatttgaattaacagctcatatcagcgatgggggcaccccggtcctagccaccaacatcagcgtgaacatatttgtcactgatcgcaatgacaatgccccccaggtcctatatcctcggccaggtgggagctcggtggagatgctgcctcgaggtacctcagctggccacctagtgtcacgggtggtaggctgggacgcggatgcagggcacaatgcctggctctcctacagtctcttgggatcccctaaccagagcctttttgccatagggctgcacactggtcaaatcagtactgcccgtccagtccaagacacagattcacccaggcagactctcacggtcttgatcaaagacaatggggagccttcgctctccaccactgctaccctcactgtgtcagtaaccgaggactctcctgaagcccgagccgagttcccctctggctctgccccccgggagcagaaaaaaaatctcaccttttatctacttctttctctaatcctggtttctgtggggtttgtggtcacagtgttcggagtaatcatattcaaagtttacaagtggaagcagtctagagacctataccgagccccggtgagctcactgtaccgaacaccagggccctccttgcacgcggacgccgtgcggggaggcctgatgtcgccgcacctttaccatcaggtgtatctcaccacggactcccgccgcagcgacccgctgctgaagaaacctggtgcagccagtccactggccagccgccagaacacgctgcggagctgtgatccggtgttctataggcaggtgttgggtgcagagagcgcccctcccggacaggtaaggtttagcaagtcatgcttgaccctgttagtgcttttttattcctacatcatattgaggaaggaatggagctgtttttttagtgatgaagatgttttcctggtgatgcattcacactttcaactggcccttcctagatcaaagttagtgcctttgtgagatggtggcctgccagagtgtggtttgtggtcccatttcagggggaagatacttgactcatctgtggacctaattcacatcctcagcactcttttgctatcacaactaaccaatcttgctaagggatggttaagctaaaacacaagatctcagcgatcagagtttagcttggtatcatttacattaggaataagctgctggatacctctaaccagtggcagcttctaggaatacaaaaactacctcattcctccacctttcaagtgattgtgacatttgtattaaaactaatagctttttgataattttcctttgtttatacagatcgtgtacctcattctcagataattttttatgaatgaaatgaaattccaggcatcctttaaattttatttcaagcattctactggaaatgatgtgcaccctgcttacaaaatatttttaccttataacagtaatgcatgtttgctagaaaattcagaaaatacagaaaagtatttaaaaaattaaaactataatctccaaacccaaagataaccatttttaattataaaagtaataatttatttcaaaaataaatctaggcaacccaagaaaacataaagtagccagactcagtggtgtgcacctgtagttcttgctgctcagtgcctgaggtgggaggattgcttgagcccaggagttctgggctgtggtgcactatgctgatcaattgatcaatccactgtctgcactaagttcagcatgaatacagtgacctcttgggagggcaggaccatcaggttgcctaaagaggggtgaactggcccaggttggaagtggagaaggtcaaaactgctgtgctatccagtagtgggatgacatctgtgaatagccactgcactccagcctaggcaatatagggaaaccatgtctctttaacaataacaacaacaacaacaacaatcccagaaactacaaaaggagagtctttttggtgcctccagtgttagtccctgtccttccagccttatttttcttaagtatatgcacaatgtgaaaggtagataaattcatatccttagacaggtaaagcattcattaattcagggtggtatgcaaggatactatccaaggcatggtatccatgcaaggtgactgcaaggcctttgccctggagagaaccctatacatactctcaactgtaggagaaacactgttattttgttactcagtgcatcattgctatcaactcttggatttggcagttagtcaaatgaggttctaccatttaccaactaggagtctgtggccaagttactcaatctcctttctaagcctcttcctcatatgcaaaaagggaataataagtgttttataagattcatgcatgatataatgtatgcaaagtgtttagcatggtgcctggcatatcataactgttaaacaattattagccagctcctagcattttgggaggctgaggcaggcggattgcttgaggccagcagttcaagaccagcctgagcgacatagtgagatcctgtctctacaaaaaaaaaaaaaaatgtgttttcattagctgggtgtgttggcatgcacctgtggtaccagctacttgggaggctgaagtgggagaattgcttgagcctgggaggttgaagctacagtcagctgtgattgcaccactacacttcaaccatggcaatagagtgagaccctgtctcaaaaaaaaaaattatcagctattactataattatttttattagttcctcactcacctaaaatctcaaacacaccttagaaatacacatatgagaacaaccaaaaatgacaaagtagaagcacatatgaaaaggctaagaaagcatgaaagccagcaagaaataactgccgctcttctggtcagcctggaaagcaactggcattttccctagaacaatgttttcaaacttggttgcacattaaaatcacctagagaccttttaaaaattctgaaacccaggccacaccccgacaaatgaaagcacagtctctgggggtgggacataggcatcattttttgaaggtccccacttgatcctaatgtgcagacaaatttgaaaaccacagctttgggaggctgaggtgggtggatcataagatcaggagtttgagaccagcctggccaatatggtgaaaccccgtctctactaaaaatgcaaacattagctgggcatggtggcgcatacctgtagtcccagctactctagaggctgaggcggaagcatcagtgagggagaatcagtgaacccaggatgtggaagtttcagtgagcccagatcacaccactgcactccagcctgggcgacagagcgagactccacctcaaaaacaaaaagaaagaaagaaaaaagaaaagcagtactctggaacctaccaatccatcatttagcatatttgtgaagtaaagtgttattctggtatttgcagaaccagaatccagctttattgggccaggcccaatttttttaaaaaacatggtaaggtctcccagccttaaagtattacatagcatagctctaaaagatcactgtaggaagacataaaatggtatttcagtcatctaagggaaaaaccttcctaaagcactagcccctggacaactattatttaaacatctacagctgttcaatagatattgggttctttttggagggatgtgacaaaattcttgtataattagattgtgatgatgattgtatcagtttagtacatgtaaatacactgaaaaccattggattatacactttaaatatgtgatttgcatggtatgtgaattatgtctcagtaaaaatctagagatggggctgggctcagtggctcacgcctgtaatcccagtacttagggaggctgaggccagcggatcacctgaggccaggagttcaagaccggcctggccaacatggtgaaacttcatctctactaataatacaaaaatcaggccgggcctggtggctcacgcctgtaatcccagcactttgggaggcggaggcgggcggatcacgaggtcaggagtccaagaccagcctggccaacatggtgaaaccccgtctctactaaaaatacaaaaattcaccaggcgtggtggctgaggcaggagaatcgcttgatggtggaggttgcagtgagccgagatcgcgccactgcactccagcctgggtgaaagagcgaaactccatctcaaaaaaaaaaaaaaaaaaaaaatcagccagatgtggtggcaggtgcctgtagtcacagctacttgggaggttgaagcaggagaatcgctttatctcaggaagcagaggttgcagtgagccaagatcatgctgttgcattccagcctgggcaacaagaacaaaactcactccatctcaaaaaaaaaaaaaaaatatctagagatgggagaatcatatggctggcataaaaaggtcaagtcaaagatatgtaagattaaggctttacgatgctccagttctagtaaaacagaccaggtacttgttttggtgtgaaattgccaatataagtatagtactgtacatattagttgtttagcttaggtaagtcttttaatctctttaaactccagtttcctcatctataaaataaagagaatatctactttgcaaacttgttgtgagagtgaaaagtaatgcatataaagtccctgtatggagcaagtactcaataactatttgttgaactaaaaatgataatactgatattcaccatttattagcatccctatgtgccagacactgtaaacaattaaaagttatcattctggtacccagagtacagtatgagacagacatgcaaaaaaaaaaaaaaaaaaagataatggagatctgcatagcataagatgcagtgggaccaaacgggaaaaaacacctaaatgagcctggagaaaggaagaaatgatagaggtggtgatgcttgagctatgatctaaaggttgagtagtagcttgtcagacagtaaaggggaaaggacagggcagggaggggccattgcaagaaattccatgcagagggattatggtatttcattatcactgaaccttaaactgtgtgtgtggccgggtacggtggctcatgcctgtaatcctagcactttgggaggccaaggtgggcagatcacttgaggtcaggagtttgaaaccagcctggccaacatggtgaaacctcatctctattaaaaatacaaaaaattagccaggtgtggttgtgggtgcctgtaattccagctacttgagcagctacttgagaggtcgaggcaggagaattgcttgaacccgggaggcagaggttgcaatgagctggtgtcaggccactgcactccagcatgggcaacagagagagactccatctcaaaaaaaaagtgtgcgtgtaaaacagacagtctttgtaggagatgaggtgaagcaagtaggcaggagttagatcctgagttacctttgggccaagccaaggagtttttattttattccatatagatgacagtcactgcagaaatttgaactgatatgcatatatcatgaggtttttttgttttagaaatattattctgtcagtcataagtgaagggactggggacattgggactggaggcaaagagatcttatctctttgcaatagtttgaaagctattgcaatatttgaagagaagattgataaatgcttgaaccagcacagtggcagtacagatggagggagctgactacaataaaatcatcaggacttgttgattgacatgatataggaagtgagggacagggatgagtcaaggctgatccccctagatcctgactaaggaagctgggtggttgacagtgccattcacagagacagtgaattctggcataaacacctaataggtcaggctggtttacacctccatcattcccatgggagaaggtatagaggggtgtgtgtttgtgtgtgtgtgtgtgtgtgtaaaagaacacagaaagccagattcctctttttgacaccagaatattggttcccaccatagtcaaaaggatattcctgaggatcgaggcttggaaaaatattggggaaggataagaactccagttgttgctgctttttttggcagccagtgtaacctaggtaaggacttggttgaattaagaaatttcatgtccagatcaggatggatttttctatttctctgagctctggtgtgtttcccactcagattgcaggtcgtaggtacctacggtgtgaattgtgttgtgtttctgtgcttgtgcaagggagtagctaggttgctgggaggtctggatgagggtgggggtggggtgagatcaagtctccagctccaagaggtcccctggggctaagtgaaaagcttgctcttttgaaatggtcttcgttggtaattaacaaaagatcaagaataccttggtgtcagataaagggaatttgtaggcacaatgctgttggtagctgatctcaatcattcaaggaagctattaaatctatgaacattagcattctgccaggtaaagagatctggtccttagcacctcccagacacactgattctttactgttttgaaacatctccctctcctggcttcctccaccccgcttccatactgtccttgaaatcaatgaatggtaatttagtgtatctagtgtatcactagcaaatgtctgaataagaaaggtttggtttccgctgtgtctcctgttacaatgagaacatgtactgcataaatttaattggctacgttaatgtgtaagccttttctgcaaagagatggatccgtttctgaatattctgcagaagggcagagttttgagtatatggcagtggttctaattagcagttgctccaatacaatcagactgagacggaagctactcatttagaatactggttgatgacaacactggcttgaacaaagtgaccactctccaatggctactctccctctcagtgggccgcaggttgctagggctcaggctgtggctgttttccccgccgaaaaggggcggggtcagtcggtgtgttaggaaaaaaaatgtatatatatatatatgttgtctgcctccccacagagataacaacccgtggaaaaacatgccgttgagcgggaggaaggcgaaaagataggctgggttttttggggggtgggggagcgtggaggatagggtgggctttttcccctccaatgctgcgacgcattaaccctgctgctgttgggacgttctctgctcagcctattggctgagcccgggagccgctgtctgccaatcgggtggtgaaaggcagacaaatctaccccgccaccagcaaaaacggcgcgtaacccttgcggcgccggccgaaccgcgccagagctggcgcggggaaagggagataggtgtctccagctgctgtggctgtttggggcgggtcggcttcatccgcgtctcaggagcaagtagagaattagcgggcggcagcaatgctccgcaaggtgagaagctggacagaaatctggcggtgggctacccttttgttcctcttttaccacctgggttacgtttgtgggcagatccgctacccggtcccagaggagtcacaggaagggacttttgtagggaatgtcgctcaagatttcctgctggatacggacagtctgtcagctcgcaggctgcaggtcgctggagaggtgaaccaaagacacttccgtgtggatttggacagcggagccctgctcatcaagaacccaatcgaccgagaggcactgtgtgggctcagtgccagctgcatcgtgcccctggagtttgtcaccgaaggtcctttggaaatgtaccgagcagaggtagagatcgtagatgtgaatgatcacgccccccgttttccgcggcagcagctggacttggaaattggggaggcagctcctccaggacagcgtttcccgttggaaaaggctcaggatgcagatgtggggagcaattcgattagcagctataggctgagctccaatgaacactttgcactggatgtgaagaagcgcagcgacggcagcctggtcccagagctgctcctggagaagcctttggatcgagagaagcaatcggactaccgcctggtgctgactgctgtcgatggagggaacccgccgagatctggcaccgcagagctccgggtatccgtgctggacgtaaacgacaacgccccagccttccagcaatccagctacaggattagtgtgttggagagcgcaccagcgggcatggtgctcatccagctcaatgcctcagacccggacctgggtcccagtggtaacgtcaccttttatttcagtggtcatacccctgatcgtgtaagaaacctctttagcctgcaccccactactggaaagcttactcttttggggcccctagactttgagagtgagaattactatgaatttgatgtgcgggctcgcgatgggggttctccagccatggagcaacattgcagccttcgagtggatctgctggacgtaaatgacaatgccccttacatcacagtgacctcagagcttggaaccctccccgagagtgcagaacctggcactgtggtggcacttatcagtgtgcaggatccagactcagggtcaaacggagatgtgagcctccgcattcctgaccacttgccatttgccctcaagtctgccttcaggaaccagttctccctggtgactgctggacccttggatcgagaggccaaatctagctatgacatcatggtcactgcttctgatgctgggaaccctcctctcagtacccacagaactattttcctcaatatttcagatgtgaatgataatccaccctctttctttcagaggtcacatgaggtgtttgttcctgagaacaatcgcccaggggacctgctttgctcccttgcagcctctgacccagactctggcttgaatgcgcttatctcctactcactcctggagcccaggaatcgagatgtatcagcttcctctttcatctctctgaacccccagacaggagctgttcatgctactcgatcctttgactatgagcaaacccagacactgcagtttgaggtgcaggcccgggatcggggcaacccaccccttagcagcactgtaacagttcgtctatttgtgctggacctcaatgacaatgctccagctgtgctccgtcctcgggcccggcctggttccttatgtccccaagcactgcctccatcagttggtgctggccacctaatcacaaaggtgactgctgtggacttggattcaggttacaatgcttgggtttcctatcagctcctggaggccccagatcccagcctgtttgcagtctctcgatatgctggggaggtgcggacggctgttcctatcccagctgacctcccaccacagaagctggtcattgtggtaaaggatagtggtagtccaccactctctacctctgttactctcttagtgtccttagaggaagacactcatccagttgtcccagatcttcgagaatcttcagctccaagggaaggagaatctcgtctaaccctctacttggctgtgtccctagtggcaatttgctttgtctcctttggctcattcgtggcactactctctaagtgtcttcgtggggcagcctgtggagtcacatgctttcctgctggcacctgtgcctgtctcaccagatctcgaaggagggaggggcttcccccttccaatgggatcctccgaatccagctagggtcagatgaccctatcaagtttgttgatgtgggaggccactctcatggctgtacacccttggcttctgcacccactcggagtgatagcttcatgatggtgaagtcacccagtgcacctatggcaggggagcctgttcgcccaagctgcccaccctctgatcttctctatgggctagaggtgagacctttgcaggctcaacaaatgcttgagggttattctgatccaggcatatggctaggccatgtcctagagagtactggcctctcagtaagtgcccatagtgatgtcaccatttttgtaagaggtaactatgtggtagacgctgtgctttgtaactgtttcgtgaattaaccagagttgtcacagtttagcattgggggcgggtcatgcctatatctgagtaagaaatgaaagtaattggtgatcaagagccaggctgttgtggaagcatgatgatggaatgtgggagcacaggaggctacagtgcacagggtacagtgcaccaggcagtcacttggacaaaggtggctgttttctctactcttcctgaaagaggggatcagattctgaagtaccttaactctaggttaccatttcccaagggattgaggggaaataaaatctttgtctcccagtatctagtacactgtgaagggacctctctatttgaaacatagagacagcagaaagaggagagaactaaaggaatagagaggcacgcatcagagtggtggcatagatcttttggtctgggtcttaggactcatatcaagtccctactggggatttgaactagatgcggtaaattggaaggttggggcgggttggtcatcacctttggaaaaaacagtaagtgaaatcacttatgtcagaaaactggtttacagttggctgattcatagaaacagccaccctgtgcatctttaagttgagttctcctgaatttggtgaaaccatgaaacctagaagccaagccatccatgcttggcctctgaccaccctcctgggtgacctgattcagccccagaaatgttcccctacccaaaaactgtaacactcattccacatttggggtctggggtgtcagaaaagctaagtcccatgtcagctgacattgagatttccgcaaagcattgctggagagtcagggcaagactttacaaggttcttactaatcttttctctcaccttagcagcattcagcaggatgggggagggtgggggaatacatgggctttgcctctcccagaaggacaagattttgctggttcaagcaaagtggtggaagcttctgaagtcatgcaggaagttgctgggacagaacgctgaggagttttgtatcactttgtcttccctgttgagtaccatctgagctgtcaaactttgctgccaagggggctgaatcaacctgcagcacgaagtgagtggggaggtaggaagcttctgtgacacagatttgcagcctgtgttcccaaggtttccaggattgaggaaactccataattggttgagagcacacagactttttggccaatcagactcagagctgaggtgggagatctgctcttccagcccgcctctcctcctccagctccccagctccactcaaattcagctcccctcccccctgcccacccccgccactcggtgactaagaactgctgcaagcaggcaaacctccgagcagtttttaagaggctggaaggagacataagagacttcagctgctgcattccaagccctgggtctaccttggagacaggacagcacagacttactctccacaaagggacttctgggtcatggggcccaagacactcccacagctcgctgggaaatggcaagtgctgtgcatgttgtccttgtgctgctggggctgggtgtctgggcagcttcgttactcagtggtggaggagtctgagccggggacgctggtggggaatgttgctcaggatctgggcttaaagatgacagatctgttgagccggcggctgcaattgggctctgaggagaatgggcgctatttttccctgagcttgatgagtggtgccctggcagtgaatcaaaagattgaccgagaaagcctatgtggagccagcaccagctgcctgctgccagtgcaggtggtgactgaacaccccctggagctaatccgtgtagaggtagagatcctggatctcaatgacaactctcctagctttgccacccctgagcgagagatgcgcatctcagaatcagcagcatctggggcacgattcccactggacagtgcccaggatccggatgtgggcaccaatactgtgagcttttacactctaagccccaacagccacttctctctgaatgtgaagaccctaaaagatgggaagccattcccagagctggtgctagagcagcagctggatcgtgaagcccaggcaagacatcagctggtgcttactgctgtggatggggggaccccagcccgctcagggaccacccttatctctgtcatcgtgctggacatcaatgataatgctccaaccttccaatcctcagttctacgtgtgggaatcccagagaatgcacccattggtactctgctgctccgcctcaatgccactgatccagacgagggcaccaacggccaactagactattcttttggagaccacacatctgaggcagtgcggaacctctttggcctagaccctagcagtggggcaatccatgtgttgggtcccatagactttgaggagtcacgtttctatgaaattcatgcaagagcccgtgaccagggacagcctgccatggagggccactgtgtgattcaagtggatgtgggggatgtcaatgacaatgccccagaggtgctattggcctctttggccaaccctgtcctagagagcacaccagtgggcacagtagtggggttgtttaatgtgcgagaccgggactcaggtagaaatggtgaagtgagccttgatatctctccggacctgccatttcagattaagccttctgagaaccactactcgctgctaaccagccagcctttggaccgggaggccacatcccactatatcatcgagctgctggccagcgatgctggttcaccttccctacacaaacatctcaccatcaggctcaacatttcagatgtcaatgacaatgcaccccgcttcaaccagcagctttacactgcttacatcctagaaaaccggcctccgggctcccttctttgcactgtggctgcctcagatccagacactggggataatgcccgcctcacctactccattgtaggaaatcaggttcagggagccccagcctcctcctttgtgtatgtcaacccagaggatggacggatctttgcccagcgtacctttgactatgaattgctgcagatgctgcagattgtggtgggggttcgagactccggctctcccccattgcatgccaacacatctctgcatgtgtttgtcctagacgagaatgataatgccccagctgtgctgcacccacggccagactgggaacactcagccccccagcgtctccctcgctctgctcctcctggctccttggtcaccaaggtgacagccgtggatgctgatgcaggccacaatgcgtggctctcctactcactgttgccacagtccacagccccaggactgttcctcgtgtctacacacactggtgaggtgcgcacagcccgggccttactggaggatgactctgacacccagcaggtggtggtcctggtgagggacaatggtgacccttcactctcctccacagccacagtgctgctggttctggaggatgaggaccctgaggaaatgcccaaatccagtgacttcctcatacaccctcctgagcgttcagaccttaccctttacctcattgtggctctagcgaccgtcagtctcttatccctagtcaccttcacctttctgtcagcgaagtgccttcagggaaacgcagacggggacgggggtggagggcagtgctgcaggcgccaggactcaccctccccggacttctataagcagtccagccccaacctgcaggtgagctcggacggcacgctcaagtacatggaggtgacgctgcggcccacagactcgcagagccactgctacaggacgtgcttttcaccggcctcggacggcagtgacttcacttttctaagacccctcagcgttcagcagcccacagctctggcgctggagcctgacgccatccggtcccgctctaatacgctgcgggagcggagccaggtgaggggctcggcgccgccccgggcgacccctgggggcggcactggagaagccgcccgtcctcataagggattgaacttgcatccactcctctccggccggcttggtcgctggctgcgctccacccgattctcgggatcattggaccgtttgcgcgaaaccagagtggccgattaagggatggggctccgagcaccgggggtggtggcgactgtgggcgaggggaggtgggaccgacccccacccctacactcaaaaaaggccggggcctccttcgagcttccggtgaatttcgggcgatttccgcgggtgtcgggggtcccgggaggaggcagtcacagatccacccctgcagccagcctcctaggcgccggctccggcacgcttcgccggtctgtagatttcctcttcgatttctccccagctcccagcatctgtgacttcactgttaccctccctatccccgcatcacccaaccgcacctgtctgcgggacttaggtgtgcgcgcggggctcatgcgtgtcctccctgctggccacccccacggcccacacaagttgcacgggctcgccacgccccgccaacacgtgcgcggacgcacgcacgcactcctcgcacgtgggcttacgcgaataccagctttcactgccactcgctcgcggccagattcacaggcctgttccggtccactcgcagctcccctctgccgctccctccgccgggctcaggagtactcgtagctgattgtgcgcgcctgagggtcccagatcgcggccgcccaggaccaggcgaggactccggagcctcctctcacctctcccacctgcgccccgggctgggccgggtcgcctggggggcggcctgagcgaggcgcggggccaggagcgctggagcgactgccgctctaagtgccgggcgggcaggactctacgatccttgggccagaggtccggatggtcccgggactccgtctcaagggtcggcgacccctcaacccagaagcctcgagcaggcggacaggcagagctgcccagtggccgaggcgcggcagggctccgcgttgggcgagtgagtgagcctctataggacagcaggactgggactccagtggcaccagcggccccttcctcccgcaggaagtgaaagcctcgagcgccctggctctcaacccccagagatacaggcttttggcgccgtcgtgatcacaatgtgcccagcgatctagggtcagagatttggaggtgaccaaactatctgacactctaacaagtcctgtctcctctggcagatggaaagctataggctctgccagatgccagggtgcccttatgtgtgaggaaactacaatagtaaaaaacacaagtttctccaactccaggagcttttattcaaaatatatcaatgcctaactctgctcctaggactgtattttgaaacacccccaggtgattttgatagctgattgagagaaacttactatataactcctttgagaacctcatctcatttgctcttcccaccattgctgttggctaggtactaacatgcctctcttataacagcttcacagaggtcaagtgacttgctcaagttcacagagcaagtaagagagattctaacccctgtctaactccagaatgtgtgcttttaatttcttggcacttggaactttaaaagcttgaggacaggagaggggagttgcctctgctgggattttgcttctgctgggatggggcaagggtggggttccttcccttttaggaccttacatgtggggaaagtcttctgtggctcctcatttctgagcagtccccgcagcgcaaacttggccagttatccttttggagattgagttcccccagctccgtttcctcctatcacaatcactgcatttccatgtagattctgctgtgtctaagaatacagtggctgagggctggccatccctgtgcccttctccatggcagccccagaatggtgctggtgactcccgatacacctggaatgctaggtttctgggttctgctcatatcactgccacctgtgagccttgagtgagccactggcagttccggagcttccttctccctggagtaatctgagatactcacactctctgcttctgggagcaagtatgagtattaattaccagcccaccccagaaccagtgaggaggtggctctaggagtgctccatgagagtgtgtgatgggataacacaccccctggaaagaccagaagggactcaggaatgaagtggctggccagagccccacaccttcagctaggtgggagatggctacacatcagccccttgggagccctggagacttagttggccctgcttggaggctgtgggagctggatccctccccgctgcatcccttccatttttctccgtctcagacagagcagccttgttctcttctccttagtcacagaccattgtctggcacggagttctaggggtgagaagtgtcccgggacttggatgccccgcaaaggcccaatctggcatgactcctaaattaataatgtatttagctgtgggaagagattcttgcaagccaagggcccagagaagatgtccctgtgaatgtgtcactgcacaacctggcaccaaaagggttaccaagaacagcagccatcttgctgcagaggatgctttgttcccagctgaggagttgaataaattcattctagggctggtagaattctcattgaaaagcctcctttgccactttagggggctttgtctgcacctcttcccccagttccacagaagatgccttcagtccttgaattttggctcaggagttctgactctgggggcagggaggaaggggccatttctttaggaaaggagtctcagcttgctcactgtggtcagatgaaatgtgatttatctcttggtttctggtacctcagacctctgagacctgaggtgtattttgtctttggagatgagtccacccctgccccctcttagtccgttttcttctctgtgcccactcccctccttctctcccggcccatccctaggggctcgggtgacattctaacttctcacgggtactcagcccctttccctctgttttctccacagcaagccccgcccaacacggactggcgtttctctcaggcccagagacccggcaccagcgggtaggtgactgattctccagcccaccctcttctctgcggcattttctcagggatgacgtgggaggagatgggggagggcccagcatttgctacagatggcttctccctcagtttgagatcccagggaggtcttggtgtgcggggggctggcacacagaccccggaaggaagaggcgactgccctgactgttcaggaagctcaattcacatgcttgccccttccctcctcgccacgaccggcaccttttcctatcccctgagggcactgtggaaccaaaggatggtcttaagctggtctctgggtgaaagcgaggctttctatgcccatgtactgcctaaccccctcccctgagttgagctgggctccattatgacctggggctcaggcagaaaagcatttgaccggaggaggcggtccgcactcagcgcctcctccagagcctccagagccgaggctgactgcagcctggggagagtggaggcagcacagctggaggtggaactgaggaaggactgggcggggcatggagcaggcccccttctccggcccctcctcccactgtcctctgcccctacttgtcctgctctctgtctgtggggtctccgtgtctctgcccctttttcttgagtttccgtctttgccactttctcttacctctcagtccttccctcagtctctatctcgctttgcaatctctgcctctccctctcttctccatctctgtcttagcttccgtcttgattgctgcacctcagcctcagtccctttcatttgtctacttgcattgatctgtgccgcccactgtgcctgccatggcataagtgctcaataaatgtggagtgagtaactacacgggacccttagtctctttctccttctctatctctgcctccctgtccttgtcctggacctcttttctgtttctcctttcaccgtttcctagcgccttgtgttcttctatccccagcctctatgtttctctgtctctcactatttctgctttcctctctgttctttgtctctctttgtctctgtctctgtatatctttctttgtctctgtctctggtctctgtgcctgttgtctttttctgcctctttctctgttactctttctttatctctctttttcttttatcttgtcttttttctctgagcctctgtctctgtctctcatttttttgtgcttgtgggcaagccagcacacacaaccccccacccaccacccaccaacaccccgctctcttccttccctgcccctcacacactgagcctttgatcgcagctctccaccagacaccctcccatccaagcagccccagctgctcatttcaatctggtatgaattcctgctgagacaggaaccccctgcgggctgaaggggagggaaacttcagcagaaagaccttcagttggtctgagcagagtgggataggctctgcgccaggcctcccagttagaagtcaggagcctggaggagtctcagagcccagggagagaagcaggagcttgggccaccttaccctacctcctcaatggttgagtacttgctgtccacatttgccaagttgctacagatgctgagcttccaagagttatctttcccccatcctgcaaccaaccaaacccttgttgccacaaggacccaggagcccttggtgtatggcagagattccagcttctgggcatgcacagtcctgtcacccattttaggaacgcaaagcgcttcttagaaggcccctaaaaagcagcagatcaaaaggcttgggctgcccttgcccttcctttgaccccagctgttgtccttctccctgctggccttgccaaccttctcataagttatccattaagtcattaatgtattcattcgttcatttattcaacaaatatttatcgagcatctactatgagcagggccctgtgctaaacattgggctataggagtgaacaagtagatgtgatcccagaactcataggcttccagaccagcagaggagactgaaaatttgcaacaagtaacacttaaaaaaaaaaaaaaaggctgggcactgtggttcacgcctgtaatcccagcactttgggaggccaaggtgggtagatcacttgaggtcaggggtttgagaccagcctggcagccaacatggtgaaaccccatctcgattaaaaatacaaaaattagccaggcgtggtggcaggcacctgtaatcccagcgacttaggaggctgaggcagaactgcttgaacccggaaggcagaggttgcagtgagctgagatcacgaaaaaaaaataatctagccacaaatcacagtaagttctgagaggcagagaacaatgtgagtgtaatgggggggggaagatcagagaaggcttctaggaggaggtgacattgagaagttctaggccatttatgttccctctacctaccaccaccccaggccatacactggctttgaagcagaattcaccattgaacctggaagccccaccaactgcctctcatgtgtcctctggggtgagcaccttacccctgcctcaactcccattccatcaaatgagaggcttagtggcctggaatacatgtgggagctcttggagatatggaggagaaggtgcggaacctctctctctctcctctctctgcttccttagttaacttgtggaggatgcaacaaaccttttttttttttttttttagacagagtcttgctctgttgcccaagctggagtgcagtggtgcgatcttggctcactgcaacctctgcctgccaggttcaagcgattctcctgcctcagcctcccgagtagctgggacagcaggtgtgcaccaccacacccagctcatttttgtatttttagtagagatgggtttcgccacgttggccaggctggtttcaaactccccgacctcaactgatccacctgcttcagcttcccaaagtgctagaattacaggtgtgatcgcccccggccacaacaaacatttttgattcagcggctccaaagtgaaataagcgttaggatctagtccagtaacttcaacttctctccttcattcattcaacaaatggtcagtgagcactttctgttggccaggcagtgttctcgatgtgggaggcccctgccctcaaggagtttacagtgcactgaaggagacaaatattgaccaaataattacaaaaataaatgtgagactgaaactgtcataagtgctaggtagaattgtatctggtggtgtgggcgtataatagggatttgatttagggagcaggaggacatcctggaaatgaagttgtgctgagatctgaaagacaaatacaaattaaccagctaaagaaaagaaggaagagcattccagatggtcaggcataccagcttcaaagcagggctggtgttgagttcttcagtaaacttggttcaagatcaagccagctctgggtcacactgcctacacagaaggaagagcattccaaatgggaaaagcctatgcaaaagccttgtggtgaggcctcctgggatcaagggaatggcagggagttttctctttgctggcactggagtgaggggatgaagaggagaggttccttttatccagtctaaccctggttccagccttctgttgatgccctgcctcactccctccccaccatcttgcccactgccctccagcctggtctggtcagacacaccagcttcaaagcagggctagtattgagttcttcagtaaacttggttcaagttcaagtcagcactgggtcacactgcctagacagaaggaagaagacctggccaggtgtggtggctcacgcctgtaatcccagcactttgggaggctgaggtgggtggatcacctgaggtcaggagtttgagaccagcctggccaacatgatgaaaccccatctctagtaaaaatacaaaatattagccaggtgtggtggtgcacacctgtagtcccagctactcaggaggctgaggcaggggaatcgcttgaacccaggaggcggaggttgcagtgagctgagatcacaccactgcactccagtctgggtgacagagcgagactccatcaggaaagaaagaaagaaaaagagagagagggagggagggagggaaggaaggaaggaaggaaggaaggaaggaaggaaggaaggaaggaaggaaggaagaaaagaaagaaaaagggagaaaaaatgaagaagacttacattctgaagttcctgcttggcacatgcttctcctccccaccactatcccttctcaggtcatcctttgggtgtctgatcccaatagctgttgtctcaagctctgagcccagcaaaccatttcccccttcttaggctgtaacccaggccctgccctgcagctgtccccagcctctgcacaaagagtctccatttggtccctagactgttctctgatggctccacactaccatccctcctctgagagacagtatccctgctctctctcagtttgggcagtcattcaacaaacaaatagcaacttaatttttttccacttataaaatagtacatgctcattatagaaacatgaaaaatagaaaaaaaattaaaaggaaaaccacccatcattttacaatctagggagaaccaccaccaactacagtttaatatgaaacatttcaaatatgtacaaaagtagagagaatggtgtcatgaacctgtatgataccactatccagcttcaactaatgccttatcttgtttcacctatatccctacccttatcctgtccttggattcttttgaagcaaatctcagacatcatataatttcatcttggtctccaccatctttaacagatgacttttttttttttttttttttttggagacagagtctcactctcttgcccaggctgtggcacaatctcagctcactgcagccttcgcctcccgggttcaagcaattctcatgcttcagcctcctaagtagctaggattacaggtgtgcaccaccacacacagctaatattttgtattttcagtacaaacagggtttcgccatgttggccaggctggtcttgaactcctggcctcaagtgatccaccctcctcggcctcccaaaatgttgggattacaggtgtgagccaccttgcccggccagatgattctttcataaggtccacattttatatttgagtgagtgtctcttaagtatcttaatgctcttttaatgtaaaagacttcccctccatcttccatttttgcaatttatttgttgaatccctgccttttcatatatatctttctaaacttttctttgtgtaatcaaagaacatgcatgagcttcatttttatttttatttatttatttatttatttatttatttatttatttattgatacgtagccttgctctgtcacccaggctggactgcagtggcgcaatctcggctcactgcaagctccgcctcccaggttcacgccatgctcctgcctcagcctccagaatagctgggactacaggcgcccactaccacgcccggctaattattttgtatttttagtagagacggggtttcaccgtgttagccaggatggtctcgatctcctgacctcgtgatccgcccgcctcggcctcccaaagtgctgggattacaggcgtgagccaccgcgcctggccgagcttcattttaaaaaaatctcattcacctaaataagttgttcacaaacttgtcacactttcatgtgacactttattcacatattaagaactgttattcccagtcatacggtacatttcctactagttttttaaaaatagcaactgaggccatactgtccaacagaattatagcttttttcttctttgcagtgtatcatgagaatttccccatgtctttcaaaattcttcccaagtcatttgcagagtaactcctcttatgaatatacatattattttacagaataagtcctcatatgaatatacatattatttttctaatgctaatgggcttttgctacattagaaaacatacacattcatttacaattttttttttttgagacagtctcgctctgtctccaggctggggtgcagtggcgccatctcggctcactgcaagctccacctcctgggttcaagcaattctcctgcctcagcctcctgagtagctgggactacaggcacgcgccaccacgcccagctaatttttgtatttttagtagagacggggtttcaccatgttgaccaggatggtctcaatctcttgacctcgtgatccgcctgcctcagcctccctaagtgctgggattacaggtgggagccaccatccccagcctcatttacattttaacacaattaaattcagggtgttgtcagggtgacttcctagatttctcagttttttgagcatgatgtagggagtattttattatagtccagtctatgggatattcccttatacacacacacacacacacacacacacacacacacacacacacaccccaaactcaatagggcaagaaccatattcatcatctcttaaatcctaggtcctgtcacaggccactgcttggaaaatagttgactaaatgtagtccatttcttccatttttacttttcactattccccaaatcctggaagagtccctcatatctgctgctggggctccaaggcctccaagctgaagcccagtacgttgttgtgcataagatcataggccctggaatcatattaggctggctttcaggttgcaactctaccagttccagctgtgtgactctggtatagtctctcaacctctctgagccctgttttcatctgttggaaaatatagataatcacaacacttatctgcagggtgattccgaggataaaaaagacaaatatattacccagtcagcttagaataggaagctctcagtaaatggttaaaaaagaggtctctctccctctgctcatctcttacccagcttcacataattggcagcccacccacctgtttggccctcaaccttcaaccatttcccaggacgcctccttacactcctgatcatcatggttccaaccccactgttccactcagctttgttccctcaacaccactgctccctgtgacaggtcatcctcctaacctctggcatctggtcccgttgtctccctgacaacccgcatgctctcctccctgcaacccccgccgcttgcctgctctccctactttattcccattagcccccttcacctggggctgagaacacctggccttgaccctgcaccctcagccaggcccacagagctcagtcgggccggaagtaaggaccccagatattcagttgaggaatttaacattaatacaataatatagaatccaccagcagattttcataaatgttctgtgtgttcttttatccttttttttaatccaggattttatcaaggagcatagattgcatttggttgtcacgtctttcctctcctttaatctggagccagctcccagtctttttatttttttaatgacatggatatttttaaagagtccaggccagttgtactttaaaatgtccccgaacctggatttgctggctattctctgatggttagattcagattacacaccttggtaggaatacttcccgcagcatcacactgggactcatctaacgtcggcctgtcccactatcagtgatgccgagtttgttcgtgtggtaaaaacagtgtcccagatctctccattataaaaatatatttttataaagatattttaaaatatttgtgaaaatataagtaatctgtggatgatactttgagataggcagcaacccttcatgcaattttagtattccctgatgatccttgcctgtatctgtttttacatcagtgattacaaagcggtgatgttctgtcattccttctacatgtatttgctggtattcttctgaaaattacctggatgatttcttcagatttaaattcactgtcttttccttggggaagcctggactggctgagctgcctaaccctgactctctgtcttttttttttttttgacagggagtctagctctgttgccaggctggagtgcagtggcaaccttcacctcctgggttcaagcgattctcctgcctcagcctcccaagtagctgggattacaggcgtgtgccaccatgcccggttaattttttttttttaatatctattttagttgagacagggtttcaccatgttggtcagaatggtctcgatctcctgacctcgtggtctgcccgcccctgcctctcttcataccctctggtagcccctgacacagcccatggcaagtatcacaattgcaattactctattgtgtaattatttaaaatcagcctctcagtgcccaccatgagcaccgtaaagatggacagtttctatcatactcacagccacaaccccagcacctggctctgtgtctggtacatagaaattgctcaagaaagaattgttggaggggcgcggtggctcacgcctgtaattccagcactttgggaagcggaggcaggtggatcatgaggtcaggagttcgaaaccaacctggccaatatggtgaaaccccatctctactaaaaatacaaaaattcgctgggcatggtggcatgtgtgcacttgtcgtcccagctgctcaagaggctgaggcaggagaatcacttgaacctgggaggcagaggttgcagtgagccgagatcgcgccactgtactccagcctgggtgacagagcgagactccagctcaaaaaaaaaaaaaaaagaaaaaagaaaagaaataattattgaatcaatggaaacagaattacaactcttcccacttttgggaaggagaattgagattcctgctttccccttcaaccctagctttatgtttgttgtgatggtatagaggtcacacatggcagccttgtgtctgttcttaggctgagttcatctacttagggacggggaatcccagattgggcaaaaccaaaagcagggacagaccttggaaaaattgtaaagcagttcttggttgtgctcacccaccatgacaaaatatgcacacacacaacgcaacacacacacagacattttcatgccttcaaggcctaccctacagcctttcccatggtgccaaacccttcttcttaccttacagtcacttaactgtctctgctggtctcttcccactcatttaggcaacaaatatttattgaaaaacttctctgagccagatggtgccaaacagttacctaaagggcagactgtgtgtgtgccagggctgtttcccgccaacactcccctgcaaattgaaataatttcatccttggaaattcaaaaaaatcatgaaaattgtcactgtgggaaaattccaagtagagctgaaccttctaagaagcagagagttcttcttatggtttagtatttttttaaattatgaatcatttcatgttttttcaacactcggagtttctaaaagtctcacttaggtccaagtgctaggctttgtgctaggtgcttcagtaggaagcaggtggagtcgctgcctcacagaagccagtgtggtggaggaacagacaggcactacaacagctgcagtgtgactagtgccatgtggggcagccgctgggatgggagtacagtggaggcacctgcccagtctgagtggatctcctctgatatattttattcgtgtcatcatggcaaatgttgggggactggcattctagggaacaccatctgcccaggattcacagcaagagggaacttgagggataggaaagtgcaccttggaaaaggtttgatgatagagtgtttgagggcggggggtgggggttcttgtaaaataggaggggcaggttcttctatggccgtggattttactctgagggcttaggaagccattgaattttagaaatttcttctccctgctccagggtctcttggggcctcctacatctccccctaggtacctcctaggtccccactttttctctagctctggaacattctcttccatttcccaccttcacagtcctctggagaaggtctgatctccctcactatgacaggaagccaggctctctcatggtgggtgggggaatgcactatgttcaatgcattggaccagcctggccaacatggtgaaaccccgtctgtactaaaaatacaaaaattagcctggcacagtggcaggtgcctgtcatcccagctacttgggagactgaggcaggagaatcgcttgaacccaggaggtggatgttgcaatgagccaagatcgcgccactgcactccagcctggatgacagagtaagaccctgtctaaaacaaaaagaaaaaagcatcggaggcagcaaagagctggtttgagggactgacttgtgggattctggcttctgaaggattgtagaagtgcctcctaccttgctgagagaaacaggtcttgggcatggggtagggttagggtactaggtttgggagccctgggagaggacaggaggggcatgagctgtgccggcctgggagtctgtgctcaccatcctactctctccccagctcccaaaatggcgatgacaccggcacctggcccaacaaccagtttgacacagagatgctgcaagccatgatcttggcgtccgccagtggtaagtggtgtcagtgtgtgtatggaagagtgggagacctggggttctggggtgcatctcacagccaccatgcccacggactggatgtcaaacctgtgtagtttctccagatctttcggcaggtctgaaaggacccacaattccaaacataaagcctggaattgtggctaaggaacagcagaggggttgggggtcctgggatgcctggaggagagcgaacaaggaaaagactcatggagggaatagtggttacaagtctagctctggaatgggacagtgtagctcaggtcctagctctgctactatccttgggacttggatcgacttgctcaatctctctaaacctcagtttcctcagcctagaaagtggggacagggaccccaaagggttgttgtagagattaaatgagatgataccacaaagcatagagttctgggcctggcgcttggaagccctcaagcaatgaaagtgggtgtagaaatccccagccgagagaacacctcctctttatgcgaggctcctcttttgctgcccctaactccagagtaggattctggttttcccataaggttgactaagggcttcctttgtaatagagattcggctagtggtggttgtccctgaagagtcactagggcccagagcaggagaagaagaatatcatttgtccttaagagcacagcctaagctgggcgtggtggctcacgcctgtaatcccagcactttgggaagctgaggcaggaggatcatgaggtcaggagttcgaaaccggcctggccaacatagtgaaaccctgtctctactaaaaatacaaaaattagctgggcatggtggtgcgtgcctgtagtcccagctacttgggaggctgaggcaggagaatcgcttgaacctgggaggtggctgtggtgagcagaaaatcgcaccactgcactccagcctgggcaacagtctcgctctgtctcaaaaaaaaaaaaaaaaaaaaagagcacaggctttagaggcaggccaatctggattcaaatcctggcacctggcaccaccacttagcaatgagtccttaggtaagttattaaaccccctcggtttcacttactattaatgggcacagtattaacggatctcattgtggtgttaccagggccaaatgcaagtccctcagcacaggattggcagagagtaagggcacaatatattattatctttgctgacccaaacccgttttttactgggtagaaagcagaattagaataatgcctattaataaagactagcttctggagcagcaaatcctgggcttataaggaggctggcagaggatcaaggcattgccctatatcatgaactgatagccctgccctccagcatgtctggaggactggtgggtagagaaccaggtgaaatcacaagaagcactgtcatcacacctgggcacatactaaacaaactttaggggcctcctgtcaatgaatcctctcaatagctctgcaaggcaggtctgatttctcacactcgacagatgagagaaccgagaaggcacttgccccagggtcctcagttttgagctgccaagctgaggttctaacctggctcaactcctaagtttatgctctttctactatagggaccatggctgcctttggatccagcctcggcttctctattacctgagcaggatgagaggctgtcctcttcctcgagctctgctttattcttccagatcagggttgccagataaaatacaggatgcccagttacagttgaatgtcagataaacagcaagtactatttcagcataagtcagtctcaaatgttgcatgagacataatgtactaaaaaaaaaaatgctcattgtttacctgaaattcaaatttaactgggagccctgtacttttatttactaaatctggcaactctaccccagatgtctgtgaggttaagtggggccaggcctacagctgacggaaggacagagagagaggtggcagggactgctggcctcctgaggcagagctgtcccaggtctggtggggctatgattccagagaggccagagactgagtatgaaagtggcaggcggctgggtctgaggagatgccaagttggcctcttgagggaaataaacaggtatatttagctgttgtggccttgcgccctgaggccaggaagcagctttttagcctaaatccagatgttaaaaacagaaatgaaatcagtatttatggccccaaaccctccaagcaagtcatgcagctcgttcccctgtcaaggcctcccacctttggcccacacagggcctgaccctcgtctaagcctgcgccctggggaacggaccctgggggtggaggtggtgggtcaggccctgctctcactttcacacccgcttcctagccctgaaaccagagaggttcctgaagtccagcccagccaggcctgtggggctgctgagaggggttaagtaagagggagagtaaaaaccgacacttgggaggaggcttttaaaataaacatctgcggggagggatgctctcaaggaggctgcggtttgcagctcagccagctgtgttccagctaatcagcctccttgggctactctggagttgctgccttggccctgggatggggtaggttaagaggacagagggaggtcagggagctgggggctgagtttccctgagtagaggctggcacaggagagaaggcatcacccccacctcgtccaggccagaagatgtccagcttcttgaggctctcctaagtctgcctctcctgggaccaagagaaaatcccggtccttgaccaaggtgggccttggggggagtggggtgtagagggaggggcactggagaactgactctacagaaagtcaaagctggcaatccaacttcttcccctcagatttatagatgggaaaacaggcttgagccacgcagagacttgaccaagctcacacagttccttagtggcagagcagagcaaatattctctttcttttacattctggatttccatatcttctctccctcctggtccagcccaacctcagggcaccccccacgaggtgggcgggggatggctttgtcacttgcacccactcggggtgctactcagagatcttgggtgcacataggacgtgggtgggccgagcttctagctactccgtcaggcccttcctgtcattctgtctctgcctcccttctccctgcttctccgtgttcctcctcattcttttctgtgtgcagggagactacaccccccaccccgctctttctctggcgcctctgaggtcccccctctagcccctaaatcactctggaatcctggctctttgaagccagatctgggcccccctcccctaccccttccattcccaggctgggaaaggctgaagaggctgacggctggaggggagggggcggggcggtggcggatctggcttccttttggagttaattagggaaaacagagaaatgtcagcggaatgaaagggctgggggtgggggccagctggggtaggagaggaggaagtgggcagctgctccctcccactcaacccctctcccccgcccccagaaagctctcagctccggggatttgcgacatgaaatgggggctgtagaaacctgagcgctggtgcgtgaagagaaaaaccgaggcgcatcccggctctcccctcccgtgtgccctcctcctcttatgccggcttgaaaatatttcctgtctctctatttctcaatccctggttgatgtcccaggattactcagcctctccggctttagtcactctcgctacccgctcccagggtccagggtggaggcagagggaggctgggagagaagctctactgccagctgggcctgggctggcctgggcatccctgaggttttaactgtctcctaaccacagaggatctcagggcctccagcagcgagccccaatgagtcaaactcttgtttcctcctctcccacccccgacccagtcagggcaggtgaggggtagaggtgatggcatgctggatgtgacggtgttgatgatgtattgcacaggatgaagcaccatctcatttagtcctcacagcagccttcacagtgcgtacaaatcagctggcaattccgagaggctgcattctaaacaagttcctgggtgatgctgagccagggccagagtgtggacttctctgggccccagtttcttcttctgtacagtgggacgttggactggaggtgctgtctgatgtcacctagctgtggcactctgagcctgtgcctaaagtgtccctgagatgtctagtccccgagatcatcatctcctcagcttcatagagccgagctcttctccatcttctctctacctcccattcactcagaacagggataaggtccaagctgctggtggtgatggtgactgactgtcccttccagcatgcgcttaggtacacttgggcctgaatgcccctctaacaaatgctaccgggtatggccttggtccttctaacacttggttccctcatctgtaaaatgagggtcataccacatagctggctgggctgttatgtagaggttaaaagtgattgtgcatgtgaagcatccagcagagtgcctggcacacagtaggtgctcaaatgctgttttgaaatacaaaaattagctgggctagtggtgtgcacctgtaatctcagctactcaggaggttgaggcaggagaatcacttgagcccaggaggcagaggttgcagtgagccgggatcgcgccactgcactccaggctgggcgacagagcaggactccatcttaaaaaaaaaaaaaaaaaaatgctgttttgaaatggaggcttggaagagcactcttcacccccaccccacacacttactaacggaactaccgaatctctactcgtgccaggccttgcttggcaaaggctaggggcatgtaaagccatggtttcatggctgctgccctccaggagcccatggtctagtgtgggagtcagaggctcccttgagaaagccagggcaaggaactgagagcccgtgtcacagccctgagagaaataccagcgaatgtgttttgagcacttacatctaccaggcactattttacgtacctgacatacattttcttatttagcattcactaaaaccagaagaggtggttaccattatcatccccattttgcagatgagaaaactgaagtggcataaggaggttaggtagacttgcccaggatcacagtgagtaaggaaaggagctaggaatcaaacctagactttctcactccagagcctcttaacctctaccctcaactcttgtgaagagagactaccttggtgacccctatattcccagtgctcagcgtggtcaaggcccagggtgctgtataggcattcattaactgctggggatataagacagtgactgttgaggaccctaagtttagctcccacctgatcttcctctgtctctgcagaagctgctgatgggagctccaccctgggagggggtgccggcaccatgggattgagcgcccgctacggaccccagttcaccctgcagcacgtgcccgactaccgccagaatgtctacatcccaggcagcaatgccacactgaccaacgcagctggcaagcgggatggcaaggccccagcaggtggcaatggcaacaagaagaagtcgggcaagaaggagaagaagtaacatggaggccaggccaagagccacagggcggcctctccccaaccagcccagcttctccttacctgcacccaggcctcagagtttcagggctaacccccagaatactggtaggggccaaggccatgctccccttgggaaacagaaacaagtgcccagtcagcacctaccccttcccccccagggggttgaatatgcaaaagcagttccgctgggaacccccatccaatcaactgctgtacccatgggggtagtggggttactgtagacaccaagaaccatttgccacaccccgtttagttacagctgaactcctccatcttccaaatcaatcaggcccatccatcccatgcctccctcctccccaccccactccaacagttcctctttcccgagtaaggtggttggggtgttgaagtaccaagtaacctacaagcctcctagttctgaaaagttggaagggcatcatgacctcttggcctctcctttgattctcaatcttcccccaaagcatggtttggtgccagccccttcacctccttccagagcccaagatcaatgctcaagttttggaggacatgatcaccatccccatggtactgatgcttgctggatttagggagggcattttgctaccaagcctcttcccaacgccctggggaccagtcttctgttttgtttttcattgtttgacgtttccactgcatgccttgacttcccccacctcctcctcaaacaagagactccactgcatgttccaagacagtatggggtggtaagataaggaagggaagtgtgtggatgtggatggtgggggcatggacaaagcttgacacatcaagttatcaaggccttggaggaggctctgtatgtcctcaggggactgacaacatcctccagattccagccataaaccaataactaggctggacccttcccactacataatagggctcagcccaggcagccagctttgggctgagctaacaggaccaatggattaaactggcatttcagtccaaggaagctcgaagcaggtttaggaccaggtccccttgagaggtcagaggggcctctgtgggtgctgggtactccagaggtgccactggtggaagggtcagcggagccccagcaggaagggtgggccagccaggccattcttagtccctgggttggggaggcagggagctagggcagggaccaaatgaacagaaagtctcagcccaggatggggcttcttcaacagggcccctgccctcctgaagcctcagtccttcaccttgccaggtgccgtttctcttccgtgaaggccactgcccaggtccccagtgcgccccctagtggccatagcctggttaaagttccccagtgcctccttgtgcatagaccttcttctcccacccccttctgcccctgggtccccggccatccagcggggctgccagagaaccccagacctgcccttacagtagtgtagcgccccctccctctttcggctggtgtagaatagccagtagtgtagtgcggtgtgcttttacgtgatggcgggtgggcagcgggcggcgggctccgcgcagccgtctgtccttgatctgcccgcggcggcccgtgttgtgttttgtgctgtgtccacgcgctaaggcgaccccctcccccgtactgacttctcctataagcgcttctcttcgcatagtcacgtagctcccaccccaccctcttcctgtgtctcacgcaagttttatactctaatatttatatggctttttttcttcgacaaaaaaataataaaacgtttcttctgaaaagctgaacgtttctgtataagcgatggaagctcctggcatgtgtgcatgaagtgatgagctgaggtgggtgctggaagaagggcggaatcgggaggccactttgtgtcattgcgcgtctagatgtttccgaattgcgtgtgtgtgtgtgactgtgcaatatggttgtgtatgcttgcaatgccgttgtgcctatgagacagtgtgcgattgtgtgcctatggatctgtgtaccgtgtgccattgtgtgatcggtccgctgtgggggtggggatctgagtgcggcgtgtcagtgtgcagtggagtgtgcagtctaagcttgcggctgtctccaggcagaagaggagaccccggcgcgggcgggggcgggttggcgccgggcaaacgccttgggtagaggggagaggacgtttcgttagttcccgccccttcctgactaaaattgcctacccgaagcgccccggagggcttcacgggaggagggtagactctcctttgcccccgcacccccacccccgctgcctaggggttttgggaaagccgcgggagtgggagggaatgcgggaggtgattcttccaaagccaagtctgcagctcgagcctcagtttccccatctggaattcgccttcccgctgacatctccgtagcgaagcctaagaaattggagggctcatcctcttcttgcgggggtcaaggggactgaaaggacgtgcaggaaatgagatccatcgcagactcagctcccctccctccttcctgtcggtgcttttccactcactcgcctgctctcccatctccccgccccctccgcctgcctcctcgaagcactgtgggattccgaggttgctgcagccagagaagctgcagaaaaacacggagctgggggtgaagggggacttaaaaggggaactacccggaaggacccaagaacacaaagacagagccactgcggttatctggctggtcagcaagggtatgcggcttcctccgcgctgcggaggctcccagagccaggtcacccattctgccagctcaagtctgttgtcatgggaaccaaaccttccaacttaagaatctgggggcgactttctagcgtgggaggaagggtggtgtgcacggttgctgagatggaagcagggttttgttactcagagccaggctgcggaggggcggggtgccgggcgcctgggttctattccaggcacagcagcagactggcagagcgcgtgagcagctgtggtttgtcccctaattggtatgtgtgcctataaagctctgaaccagaaaggcgtggcctccggggggacgggagggaggcggcaggcaacccatccccacacctcaggccatactgaggaggcagctgcccaggctccagggctatttaaaaggcttttatttccagttccagagcccgcccgaatgggtttgtggtcctctccaggcctctccctgtctatcctgggcctgctcattgctggtctggcttttttgtgcaggtcataacg

SEQ ID NO: 449 - DNA, 128096 bp, Homo sapiens
  source 1..128096: mol_type = genomic DNA
acacacttttagccaggtatggtgttgcaagctgtagcccacctgcatgggaggctgaggcaagaggacagcttgaacccaagaattggaggcccacctagataatataacaagactctgtctcttcaaaaaaagactctttttagactagtgttgtatttggtagtattttgcacatgatagactctgtacaatagtgtgggggatacattttttttttttgacatggagtctcgctctgtcacccaggctggatacattttacaagttctgcagtgttcacatttcagatgtacaatcacttggggtagaagacaatgttgctgacaccaacaatgttactgagggaagatcctatggcagaactacggttataaggtattttgtaaaagaaaatctcctgaccaaaatttattagatgcataaaattgtttttaagcaatggagagacataatcactaaactcagtgagctattgcaatcaaactttccagggattgtttccttcaattcagaggtcaccaaggaatgtaaaataagtgcagaggtaggaagcagtgcttcagtgcagcagatctcagtgactttgtgttttgaggctatgtattatccccctgataactttgaagatgaatgttgtatttcataaccagtaaaataattgtgtaatgaggagaggagtaggctactgcctgtgatcatcgaaatgagaatcacataatattcctgtaatgaaatcactgaaactattgggaagggggtgtatttgaagataagtataaattgcaccttctaaaaggcaattttggtattactgatactctccggaaaaagttgaaataaatcaacttggaggtacttagaaaagtggagaaaatgttaggaacaatgaaagaaagataaaatgtatccagtatatttctaatgagtaagtatggaaaattactgtactctgagacggtttaggccaagtctgtgttatggctatctttatatagatagtgcatgtttgaagattggggaaagcttatgtcaataaatgtttatgtacttaatctacatgatttgcctaaaaatcctcaaagttgggatgaaggcattcctaagagtacatttttagacgtcattaaatatacagacgtatccacgtagtttttgttctttcagttaggcacacaattataattattgcactggttaacttgaagcagcagaggctgtagtttcctagtgctgactctgggcgccgctgttggccaaagtggagagcttggcgctccagatctcctcgcgcagccgcagcgcgctttccagggcagccccagctcagactccccagcgccagcctttacaccgcttcctcctcggaaaaagaagaattttttcttgaactggaactgcaactaaagtccgttcggagatccaaaaatctgcaatacagaggttatttgtaacccggcgtctccaggctggtgagcaagctgaggagagcaagagggatggggagcggcgccggggagctgggccgggctgagaggctgccagtgctctttctcttcctgctgtctttgttctgcccggcgctctgtgagcagatccgctacaggattcccgaggaaatgcccaagggctccgtagtggggaacctcgccacggacctggggttcagcgtccaggagttaccgactcgaaaactgcgcgtcagttcggagaagccttacttcaccgtgagcgcagagagcggggagttgcttgtgagcagcaggctagacagggaggagatatgcgggaagaagccagcttgtgctctggaatttgaggctgttgctgaaaatccactgaacttttatcacgtgaatgtggagatcgaggacattaatgaccacacgccaaaattcacgcaaaattcctttgagctgcaaataagtgagtctgcacagcctggcacacgatttatattaggatctgcccatgatgcggatattggtagcaacacactgcagaattaccaactcagtcccagtgatcatttctcactgataaataaagagaaatcagatggcagtaaataccctgagatggtattgaagacacctttggacagagaaaagcagaaatcctaccacttgactttgactgccttggactttggagctccacccctaagcagcactgcacagatacacgttctagtgactgatgccaatgataatgctccagtgttcagtcaagacgtatacagggtgagcctttcagaaaacgtgtacccggggaccacggtgctacaggtgactgccacggaccaggatgagggtgtcaatgccgagattactttctctttcagtgaagctagccagatcacccaatttgacctgaactctaacaccggggaaattactgttttaaatacattagattttgaagaagtcaaagaatattccatagttttggaagcaagggacggtggaggaatgattgcgcaatgcacagtggaggtagaagtcatagatgaaaatgacaacgccccagaagtgatattccagtctctacccaacctaattatggaggacgccgagctgggaacacatattgctttgctcaaagtccgtgacaaggattccagacacaatggagaagtgacttgtaaattggaaggtgatgttccatttaaaatattaacttcttcaagaaacacgtataaattagtgacagatgctgttctagaccgcgagcagaatccagagtacaatataaccgttacggcaacagatcggggcaagcctcccctctcctccagttccagcatcaccctgcacattggtgatgtaaatgacaacgctccggttttctcacagtcttcctatatagtccacgtggccgagaacaacccgcctggagcctctatttcacaagtcagggcttctgatccggacttggggcccaacggccaagtctcttactgcatcatggccagtgacctggagcagcgggagctgtcatcctacgtgtccataagcgcggagagcggggtggtgttcgcgcagcgcgccttcgaccacgagcagctgcgcgccttcgaactcacactgcaggcccgcgaccagggctcgccagcgctcagcgcgaacgtgagcctgcgcgtgttagtggacgaccgcaacgacaatgcgccacgggtgctgtaccccgcgctgggtcccgacggctctgcgctcttcgatatggtgccgcacgctgcagagcctggctacttggtgaccaaggtagtggcggtggacgcagactcaggacacaacgcctggctgtcctaccacgtgctgcaggctagcgagcccgggctcttcagcctggggctgcgcacgggcgaagtgcgcacagcgcgtgccttaggcgacagggacgccgtccgccagcgccttctggtcgccgtgcgtgacggtggacagccaccactctcggccactgccacgttgcacctggtcttcgccgacagcttgcaggaggtgctgccggatatcactgaccgccccgacccctctgacctccaggctgagctgcagttttacctagtggtggccttggccttgatctcagtgctcttcctcgtggccatgattctggccattgccttgcgcctgcgacgctcctccagccccgcctcctggagctgcttccagcctggtctctgtgttaaatccgaatccgtggttccccccaactacagcgaggggactttgccttattcctacaatctatgtgttgcacatacaggaaagacggagtttaatttcctaaaatgtagtgagcagttgagttcaggacaagacatactttgcggtgattcatctggggccttatttccactttgtaattccagtgaattgacttcccatcaggtgagtttcctttaagtataatttaatgctcattgcctacccatttctccatattcacaagaaaatatacatatttgcaggaaaatatataatttttagatgtcatggatcattttaggaaagttgtagtcagttaaaaagctgtcatatcattctacaaaggaggagtaaagtaggagcaattgtgtggcccaacatttgtttgttttttagccaagcttagatttataaagcaatgagggtgtggttttaaccacaaagtgaaagtgttagacagttgttggctctctcctaaaaagtgaatgagatttttcctatacattttccttcttgttgactaatatatgatgaatacttttttcagcttggatataccataaatataaaaataataaagccaaagaatttaagctaaaattcaacacttttcttaactaatttaactggtatggtctccatagtagtccactgttttgtttcctgtgttaacttcccttttgtttcaaaagctcttagaataaggagtcaactggatttttatgtccatggaccccttgtgattatatgcagtgtacgctgtgtgtgcgtgtgtgtgtgtgtgtgtgtgagagagatccttttacttagaaaaaggtctactatgctcattagaagatcaaaagcagattctccttacttgtaacataggagtttcaggattaatctgtattcaagctcattctatatccttcatcaaagaaaagacaatgttttgtgtctgttgtccctctcacacacagccctaatatataatgtgtaactgccttatctgcagccctaaactaatatagctagaggtcttctaatcattctcctacctctaggaaagaaatatagtcttgaaaactgccaatctggtgtgcatacaaaatatatacaaaataccaaggaacattatatgagccttttgctaggtatatctaagcaactgcttcagttaatggccactttacaaattgctgaaagaaggaaacgtctttcgattcttttttttttctttttttttttttgagacagagtctctgtctgttactcaggctgtagtgcagtggcacaatgatagctccctccagcctcaaactcctgggctcaagcattccttctgcatcagcctcctgactagctggaactcaggctcatgccaccagacctggctaatttttctgttttcagtagagaaaatattttctttcactaatttaactggtatggtttccattgtctacccagttttccatatgcataagaaaatatattcacaggaaaatataaagttttcagatttcatgagtggttttaagaaagttttagtcagtgaaaaaactatcataccagtcttcaaaggaagggtgaaataagttcatctgctacgttgcccaggctggtcttgaagggaaacagacttttttgtagtcatacttatcctttggcttcttagtaagtattatatagtcattactttttgcagttttttagatcaaagtgttaatgtaggtaaagttaattttagaatatatgtaaaagtcaagtctgctttaaatttaatcatctctttggtgaaagggatgggatggagctttgctttttatcatatattcatctgtacctttcaagtattcaaatagaaaaatataaacaatgtaaataaaatagcaaaacaatgtaatatctcataaaactgcaatggtaaaagcatttatcctattgaaattccacaatttttatttgaaaatattatcgacatgtaattcaagtggcatttagaagaataatttaaaagcaacaactctatagaaagcttgtaaaatgattaagtagtttaaaccaaataaaacaatttctgagtcagtcatctccagtaggtctattttagtctcaagataaattcatttctggtgacaactgaagttcttagttatttgttagtatatattggagacatttacaataaagcttagagcacaatgggaaatgaaagtatcatgttttttttaagaccaaatgtattgcagaaatgtgagtaatttaatccgatgctacaatctgatcattctgatctaatctgatcatttaataacactaaataaaaccttcatctcacattctttggctgtttcttttaaaatatgggtttacggataaatcaaataaattcaaaacaaagtaataagcaaatgatttttttttctcagtaatctagtagagtattacatttagaagtaatctgtatctcagtgcagtaactatttaggactgtaagcgccgctgttcacctactggaagacaaatgcaaccgaaaacactcagatctcacacctcacgaagacccgcagatgccacaaactaactgctggactgcagcgaaacccgacccctgtttggaggcactccaggtttccggaggattgtcatctccatagctgcggcaagaaactaaataagacccatttatgcacagtgaagattctgagaggattctgcagcaaaacaacaatggccgctccacagagtcgccccagacgcggcgagctgatcctgctgtgcgcgctgctgggaacgctgtgggaaatcgggaggggacagattcgctactctgtgccagaagagacggacaaaggctccttcgtgggtaatatctccaaggacctggggctggacccccggaagctggcgaagcacggagtccgtatcgtctccagaggtaggacgcagctctttgctctgaacccgcgcagcggcagcttgatcaccgcgggcaggatagatcgggaggagctctgcgctcagagcccgcggtgtctgataaatattaacaccctggttgaggataaaggaaaactctttggggtagaaatagaaataattgatattaacgataataacccaaaattccaggtcgaagatctagaagtaaaaattaacgaaatcgcggttcctggagcacgttatccactcccagaagctgttgacccggatgtgggcgtgaactccctccagagctaccagctcagccccaatcaccacttctccctggacgtgcagactggagacaatggagccataaacccagagctggtgctggagcgcgccctggacagggaggaagaggctgctcaccacctggtcctcacggcctcggatggcggcaagccgcctcgctctagcacagtgcgcatccacgtgacagtgttggatacaaatgacaatgccccggtttttcctcacccgatttaccgagtgaaagtccttgagaacatgcccccaggcacgcggctgcttactgtaacagccagcgacccggatgagggaatcaacggaaaagtggcatacaaattccggaaaattaatgaaaaacaaactccgttattccagcttaatgaaaatactggggaaatatcaatagcaaaaagtctagattatgaagaatgttcattttatgaaatggaaatacaagccgaagatgtgggggcacttctggggaggaccaaattgctcatttcggtggaagatgtaaatgacaatagaccagaagtgatcattacgtctttgtttagcccagtgttagaaaattctcttcccgggacagtaattgccttcttgagtgtgcatgaccaagactctggaaagaatggtcaagttgtctgttacacacgtgataatttaccttttaaattagaaaagtcaataggtaattattatagattagtgacaaggaaatatttggaccgagaaaatgtctctatctacaatatcacagtgatggcctcagatctaggaacaccacctctgtccactgaaactcaaatcgctctgcacgtggcagacattaacgacaaccctcctactttccctcatgcctcctactcagcgtatatcctagagaacaacctgagaggagcctccatcttttccttgactgcacacgaccccgacagccaggagaatgcccaggtcacttactctgtgaccgaggacacgctgcagggggcgcccctgtcctcgtatatctccatcaactctgacaccggtgtcctgtatgcgctgcaatctttcgactatgagcagatccgagacctgcagctactggtaacagccagcgacagcggggacccgcccctcagcagcaacatgtcactgagcctgttcgtgctggaccagaatgacaacgcgcccgagatcctgtaccccgccctccccacagacggttccactggcgtggagctggcgccccgctccgcagagcgtggctacctggtgaccaaggtggtggcggtggacagagactcgggccagaacgcctggctgtcctaccgcctgctcaaggccagcgagccgggactcttctcggtgggtctgcacacgggcgaggtgcgcacggcgcgagccctgctggacagagatgcgctcaagcagagcctcgtggtggccgtccaggaccatggccagccccctctctccgccactgtcacgctcaccgtagccgtggctgacagcatccccgaagtcctgaccgagttgggcagtctgaagccttcggtcgacccgaacgattcgagccttacactctatctcgtggtggcagtggctgccatctcctgtgtcttcctcgcctttgtcgctgtgcttctggggctcaggctgaggcgctggcacaagtcacgcctgctccaggattccggtggcagattggtaggcgtgcctgcctcacattttgtgggtgttgaggaggtacaggctttcctgcagacctattcccaggaagtctccctcaccgccgactcgcggaagagtcacctgatctttccccagcccaactacgcagacatgctcatcagtcaggagggctgtgagaaaaatgattctttgttaacatccgtagattttcatgaatataagaatgaagctgatcatggtcaggtgagtttagttctttgcttgcttttaatttccagatgaattttatttggcataaattatgttttgaaaaacattgtgaagatagttgaaaataatttttaaggtgtatcacagagttttgggtttattttggtggtgttactataaaattgaactctaatagtcataggttattgtttcatttgcttttaaacgacttggaaaagattgttcaaccattttaagccttccagtattttattcctattatcactcattcacttaagaagtagctacccgtccatactggtaattttgctattgtttgtgtgtgtgtgtgtgtgtgtgtgtgtgtgtgtgtgtgtgtgtgtgtgtatcccaaactagaacttcagaaaattatcaagaagtctaaagccttgttattagcttagcaaaagtaaaatatatctcagaatttttagggttatgtttagcatttgaacctgtaactaggctcttgtagatttcttcactttaaacctcttttctgagccctgtttctgtaccagtgcccttcaaaactttaatacttcttaccatccttcaaaacatgaacaaactttaaagatggatcttggtgggagatgagactggttactaaatattaagtatgtgagtcagtggtcacctgggctccatgcccatggagacatgaaatctaaagcctagaatgtccattgctcccccaaacaaaaaacaaaagcaaaaacattagatctgaattaaaatgtaattttaaactgttgaaagtgacttttgtaaaatatgtaagaacatatttcaatacaattccaattagctgtttcggttgtgcattgatgtgaagtggtgagaatgttgatattaagaaccaatgtttcaggtacacaagttctaaataagctgatcaattcaattaaagttattcagtcttggctggacacagtgcctcatgtctgaaatcccagcactttgggaggctggggcaggaggaccgcttgagccccgggggtttgaaactgcagtgagctatgatcatgccactgcactccagcctaggtggcagaactagaccctgtctctaaaaaaactattattaggccgggtgcggtggctcacgcctgtaatcccagcactttgggagactgaggtgggtggatcacctgaggtcaggagttcaagatcagcctggcaaacatggtgaaaccccgtctctactaaaaactacaaaaattagccaggcatggtggcatgcgcctgtggtcccagctactcgggaggctgaggcagaagaatcacttgaacccgggaggtggaggttgcagtgagcctcgatcctgtcactgcactccagcctgggcaacagggtgagactccgtctcaaaaaaaaaaaaaactaatattaatagtaaaaactcggtataggctatccattattgtattcctgcataccttcttgtagcatttgaataaagctaatacctgaattgattgttgtaaggtagaagtagatgacccaataaatgtttgttattaatgaaaaggacatttcctaaggattgtgtagtgttctactgtatggtgcatattcagtggagtgggagttaacttcatagtttgtgtaccatttggatgcacatttgagaggacaacatattattggcactttgcaattttaaaaactcggatgaaagttgccctggtaggaaagaaaatccttactctccctaaaaatgttggctagttgtttttattaatctgacaaatggactaaagaaggttgaccaatgtccacaaatttatgtaaatgaacttatgagcttcatttatccaattccaaagtcatttcagataggataataatgcaatccactagaatatccctttgtaccttgtattgcagaatagataagcatttccccaataactcttaagaatgaatttatgtactgtaaaagatatgacataagagaagtattttgagatatgaagaagagcaacgtagtagggtatatcatttcttagctacatcatatgggcagtatacttgaatgaatatttcctgaagtagaagagtaaagaaaaattatttttataaagaatgttaatatagtcaggaagaggagatgtttggggattggtataaaattgccacaactttacaaaatagttttaaatagtatagatttccctaatatgtgtaatataaaacactagaaatattggggagttggaaatcatagaaatgaacagaagaatgataaaattgtttccatagctaataaaaaatgaatttttgaaatcagtatagtatgaaggctctgagagcaagaactgtatcatattaattattatattgccagtgacaagggcaatacttagttctagctaagagttcaaggtatgtttgcagaatggtgaaagaatggaccaatgtatgcaggtttgtataaaaacccaacgtgatatttctaacaatttggaaaacagagaaagataccttaaagaagttgttataattttttattaagtatatggacgtaaaaacttggcttgttaagttaggcacacaaaaacaattactgcactggttaacttgaagccgcagaggctgtagtttcctagtgctgactctgggcgccgctgttggccaaagtgcagagcttggcgctccagatctcctcgcgcagccgcagcgcgctttccagggcagccccagctcagactccccagcgccggcctttacaccgcttcctcctcggaaaaagaatcgtttcctaaactggaactggaactaaagcccgttcggagatccaaaaatctacaatacagaggttatttgtaacctggcgtctccaggctggtgagcaagctgaggagagcaagagggatggggagcggcgccggggagctgggccgggctgagaggctgccagtgctctttctcttcctgctgtctttgttctgcccggcgctctgtgagcagatccgctacaggattcccgaggaaatgcccaagggctccgtagtggggaacctcgccacggacctggggttcagcgtccaggagttaccgactcgaaaactgcgcgtcagttcggagaagccttacttcaccgtgagcgcagagagcggggagttgcttgtgagcagcaggctagacagggaggagatatgcgggaagaagccagcttgtgctctggaatttgaggctgttgctgaaaatccactgaacttttatcacgtgaatgtggagatcgaggacattaatgaccacacgccaaaattcacgcaaaattcctttgagctgcaaataagtgagtctgcacagcctggcacaagatttatactagaagtagcagaagatgcagatattggcttaaactctctgcagaagtataaactctctcttaacccaagtttctcattaataattaaggagaaacaggatggtagtaaatacccggaactggcactggagaaaaccttagaccgggaacaacagagttaccatcgtttagtcctgactgccttggacggtggacatccacccctaagcggcaccactgagctccggatccaggtaaccgacgccaatgataatcccccggtattcaaccgagacgtgtacagagtcagccttcgggaaaacgtgccaccaggcaccactgtgttgcaagtgtcagccactgaccaagacgagggcatcaactcagaaattacttattccttctacagaaccgggcaaatctttagtctgaattcaaagagcggagaaattaccactcaaaagaaactggattttgaagagaccaaggaatattcaatggttgtagaagggagggatggtggtggactggttgcacaatgtacagttgaaattaatattcaagatgaaaatgacaatagcccagaagttacattccattctctacttgaaatgattctggaaaacgcggtgcctggaacactaattgctttgatcaaaatacatgaccaagattctggggaaaatggggaggttaattgtcaattacaaggcgaagtcccttttaagattatctcttcatccaaaaattcgtataagttggtaacagatggaaccctagaccgagagcaaaccccggagtacaatgtcaccatcacagccacagacaggggcaagccgcccctctcctccagcataagcgtcatcctacatatcagagacgtcaacgataacgctccggttttccaccaggcgtcctacttagtcagtgtacccgaaaacaaccctcctggggcctccatcgcgcaagtctgcgcctcggacctggacttggggttgaacggccaagtctcctactctatcatggccagcgacctagagcctctggcactggcctcttacgtgtccatgagcgcgcaaagtggggtggtgttcgcgcagcgcgcctttgactacgagcagctgcgcaccttcgaactcacactacaggcccgcgaccagggctcgcctgcgctcagcgcaaacgtgagcctgcgcgtgttggtgggcgaccgaaacgacaacgcaccgcgggtgctgtaccccgcgctgggtcccgacggctctgcgctcttcgatatggtgccgcgcgctgcagagcccggctacctggtgaccaaggtagtggccgtggacgcagactcaggacacaacgcctggctgtcctaccacgtgctgcaggctagcgagcccgggctcttcagcctggggctgcgcacaggagaggtgcgcacagcgcgtgccttgggcgacagggacgcggcccgccagcgcctgctggttgctgtgcgtgatggtggacagccgccactctccgccaccgccacgctgcacttggtctttgctgacagcttgcaggaggtgctgccggatatcactgaccgccctgtaccctctgacccccaggctgagctgcagttttacctagtggtggccttggccttgatctcagtgctcttcctcctggccgtgattctggccgttgccttgcgcctgcgacgctcctccagccctgccgcctggagctgcttccaacctggtctctgtgtcaagtctggacctgtggttccccccaactacagtcaggggactttgccttattcctacaacctatgtgttgcacatacaggaaagacggagtttaatttcctaaaatgtagtgagcaattgagttcaggacaagacatactttgtggtgattcatctggggccttatttccactttgtaattccagcgagtcgacttcccatcctgagttggtgagtttcatttatgtctattctttttcattacccacccaattttctgtatttacatgaaactatcgtacattttcaagtccaatgagttgtcttagggaagtcagagctgctcagaaagctgtcctaccattctttaagaggagcagtaaattgtgagtttttatgtcgcataaaagaagtagccttatagatttacaaagtagtgagagtttgctcttagcttcctctctagcaaaaacatttggtgcgtttttttgtcctctttctcaaagctaatgaattttacctattcgttgtctcattctttaacatgtttatattttattgtatgtagataaaccattaaatttaatgtatgtaatcatttaattcatcttttaaagcaaagaaactgctagtagatgtctttcttcactgatttcactggtagttttcatctctttcttatgttcctcatatatgctttcttattcctacctaatggatttatgattttttgaatctcctaaaattttattaaaaatactatatgttggctgggtgcagtggctcatgcctgtaatcccagcactttgggaggccgaggcggttggatcacatggtcaggagttcaagaccagcctgggcaatatggtgaaaacccgtctctactaaaaatacaaaaattagctgggtgtggtggcgggcgcctgtaatcccagctactcaggaggctaagacaggagaattgcttgaacctggcaggtggaggttgcggtgagccgagatcactccattgcattccagcctgggcaacaagagcaaaactccatctcaaaaaaaaggaaggagaaggagaggaagaagaagaaaaatactacatgttatgtgtatgagagagaaagagagagactgattcactgaacttagaaggtccaaatcatccaaataattttctaagtttatccaggttttcttggatgcaaaatccttttccacctctatataattaccagaagaaacttacaaaaaaaaggaaatgctattgcctgaatttctcttgctcggaatcctgacatattcttgaagaaggggaaaaagacaccggatttgtcttatcgtttggagctttaaatataaatgactggatgttttctcaacatccttgtaggatggaaggtgaatacaggattattccatttttaagacaaaaactactagtcttgtgtacatacaaagctcccattacatggtataagtcttttgcttggtttcccttagtatgtgattcagtaaatgggttccttacaaagtgctgagatttcttataataccacttacttttaacctttcagtagttttctttgttgtatattttgtgttctttttcccaaattattatataagtttaagtgatgcttagaataatgtttaagaccactttaaaattgcataatttattgatgaaggattaaaatagaaacttgcttttcagtgtatatgcatttgaatcattgaaacacagtctgtgcatgcattacatattcacattaaaaaactaagcatttttgaaatagcagaaaagtttaagcaattacaaaaatgtgaaaatttccaactttaatcctgttaatatttagcaatattaggcgagaacatctgtaactattgctgaattaatattacttttataatacaaaaatttaaaataaacgtttttccaggaattttatcatcaaaataaaccccagaaaataatttcaaagtggataatctatccttatatatgtattaatacaattatatattttacatttacaaatatataggtataaaaattaaaaatgaatgtacttccaaacaagattgcacataaaaattacttcagaaaattgttaagatacacagaaaaaattgaagcatcataaaaaggaaattataatagtttacatatctagaaatagagtgcaaagttctaccaagaataagaataaattaatattaagcaatggtttgtgattttataatacacttacagaaattttattccactttatttacaactcagatatctaaaaaatagattgcttttgaaatacaaatgcaagaaacaattggagaaatctaaaatcataattagaagagagtagtgttttctttatcagccatctgatataatgttacacatcagtgggtgtagtaacggcttaggactctgagcgccgctgttgatcaactctaagcgaaaatcaggactccatccggatttccagttctgcggctacacaaaacccggcagataccacaaacctgctcccaggctgcagcaaaactcagcctctttcttctaaggaaaagatcaccatactttgcagggtggaagaaagaacctgatgaagcagcgcgcacagagatccttttgagaaaattccaaagcgaggcagcaatggcagctccaaccaaatgccagctccgcggaagattagtcctgctatgctcgctcctggggatgctatgggaggccagggccagtcagattcgctactcagtgcctgaagagacagaaaagggctatattgtgggcaacatctccaaggacctggctctggagccccgggagctggcggagcgccgagtccgcatcgtctctagaggtaggacgcagcttttctctctgaacccgcgcagcggcaccttggtcaccgcgggtaggatagaccgggaggagctctgtgctcagagcccgcggtgtctggtgaactttaaagtcctggttgaagacagagtgaaactgtacggaatagaaatagaagtaactgatattaacgacagcgccccaaagttccaggccgaaagtctggaagtaaaaattaacgaaatcgcggttcctggagcacgttatccacttccagaagctattgatccggatgttggcgtgaactccctccagagctaccagctcagccccaatcaccacttctccctgaacgtgcagactggagacaatggagccataaacccagagctggtgctggagcgcgccctggacagggaggaggcaactgcccaccacctggtcctcacggcctcggatggcggcgagccgcgtcgctccagcacagtgcgcatccatgtgacagtgttggatacaaatgataatgccccggtttttgctcaacggatttaccgagttaaagtccttgagaacgtgcccccaggcacctggctgcttactgcaacagccagcgacctggatgagggaatcaacggaaaagtggcatacaaattctggaaaattaatgaaaaacaatctctgctattccagcttaatgaaaatactggggaaatatcaacagcaaaaagtctagattatgaagaatgttcattttatgaaatggaaatacaagctgaagatggtgggggattgaaagggtggacaaaagtgctcatttcggtggaagatgtaaatgacaatagacctgaagtgaccattacatctctgtttagcccagtgagagaagacgcacctcagggaacagtaattcttcttttcaatgctcatgaccgagactccgggaagaatggtcaagttgtctgttctatccaggagaatctatcttttacattagaaaattcagaagaagattattacagattgttgacggcccaaattcttgaccgagaaaaagcctcagaatataatatcacggtgactgcaacagacagaggaactccgcccctgtccacagaaattcacatcaccctgcaagtgactgacatcaatgataatccacctgctttctctcaagcctcctactcagtctacctcccggaaaacaacgccagaggtacttccatcttctccgtgattgcctatgaccctgatagcaatgagaattctagagttatttactccttggcagaggataccatccaagggtctcctctctccacctatgtctctattaactcagacactggtgtgctgtatgctctgtgctcctttgactatgagcagtttagagatttgcaaatgcaggtgacggcaagtgacagtggaagcccaccacttagcagcaatgtgtcattgagactgtttgttttggaccagaatgacaatgccccagaaatcctgtaccctgccctccccactgatggttctactggtgtggagctggcaccccgctctgcagagcctggctacctggtgaccaaggtggtggcagtggacagagactcaggccagaatgcttggctctcctaccgcctattcaaggccagtgagccagggctcttctcggtggggctgcacacaggtgaagtgcgcacagctcgggccctgctagatagagatgcgctcaaacagagccttgtggtggctgtacaggaccatggccagccccctctctcggccactgtcacgctcacagtagccatagctgacagcatcccagacatcctggctgacctgggcagtcttcagatccctgcagacctggaggcctcagaccttaccctctacctcgttgtggctgtggcagtcgtctcctgtgtcttcctcaccttcgttatcacgctgctggccctcaggctgaggcactggcactcctcgcatctgctgcgggctaccagtgatgggttggctggtgtgcccacctcacactttgtgggtgtagatggggttcgagctttcctacagacctattctcaggagttctccctcaccgctgactcaaggaagagtcacctgatcttcccccagcccaactatgcagacacactcatcagccagcagagctgtgagaaaaatgagcctttgtgcgtctctgttgattccaagtttcctatagaagacacccctttggttccggtgagttcattttttttctttctttcttttctttttttgttttttgttttgttttgtttttgagacagagtcttactctgttacccaggctggaatgcagtggtgtgatctcggctcattgcaacctccgcctcccaaattcaagcgattctcctgcctcagcctcccaagtagagtagctgggactagagtagagtagctgggactacaggcctcccaagtagaataactgggactacaggcacgtgccaccacgcccggctaattttttgtgtgtttttagtagagacggggtgtcaccatgttggccaggctggtcttgaattcctaacctcaagtgatccacccacctcagcctcccaaagcactgggattacaggcgtgagccactgcgcctggcccttaactttctattatagttagctttctctttaactgtctgtacttaaggtagtataagttgatatcagtgtgtttctcatcacttttcactgggcctaattgttgctccaacactgaaaggaggcatttattagttatatttgctgatataactttcatgttctcataataattaacctgctgtcaacgtaaaccatacttcatggggtagctctcagcctgcattgatgtgggctttttgggtagggttgcttcattggttgcagtggactcatatcataaaattcttactcctttttttttttttttaagagatgggggtgtcattctgttgtccagggtggaatgcagtggtgtgggtaaagcttactgcagtctcaatctcctgggcttatgcaatcctcccacctcagccttcacagtagctaggactgaggtgggagggctagcaagctatgttgcccagactggtctcaaacgatcttcctgcttcagtttcccaaagcactgggtgaggtgtgaaccacctcacccagcaaattcttactcctacgatcatttattcaggtcatactatgtttgtaagggtaaactgataaaaaggtaaatgtattcttcttagagaaacagctgaaagcccagatttattgcttctattcttccatttctatgacaggaaaacacctctttgaggttatatttttcagatcacaagtgtgtaaagtctgtttgtgtttacagatattttctgacgaagattcaaacttcagttatccacttccaaaccctagtaaaccaattttttccctttaatggtgaaagttgtcacatcttttattctcatatcttcaaaggtcttaatttcctaatgctttaatgttaaattatggagaatagtaggacattcttcttttctatagtatatgcttgctcaagagaagtttctaagactggacactgtgaaatgacaaaacaaggaattaaaaatatttctctcacttatatattatttctggctcaattctccaacttttgagtctagaaatgaacttgcatatcagatataatttaagaaaatattctcaggaactgctgggaagattctaaaactattttactgtttttagctataaggaagagaataatgtattatttaatgttattttaaacatagtgttgtttcaaatagtaaataacatttcacaagacatttgaaaataagctttgaagttgactcaaaattctatgctaaacatgtgatccatagatacactgatgactgctggcatttctgtggaaatgaagaattgttttatttgtttgtaattatttgggtttcagttgctttatttttaagaaaaaaaagctgaagtgtctgggaatcctttatgacatacagacattttaattatttcaaacacgttttcccccttaagtgggtagcaaaaaaaataaagcatacttcaggctcatatttttaaccatgcaacaagaaaattgttacaatttctgttctgaggagtagccttcatacttagtatttataaatattgaaatgtatgttaatttggggaaaacataacagatatccatgaaggcttgtatgtcatggtaggtagttactattcgataccacaaaaatgtctcttgcccttaaaaccagaacacgaggctcaccagacagatgactgaatggagtatggaaaatctttatttctgtttttcttaggctatgtaggacttaacttattgtgcattggtaacagattgtagaacataagctgaaagataaaattcttgaccttaatgtctcatcttaaaaagaagcattggttgacattctatatctcgtattacttaaaaataatgggggagcgcagtatatattaaacaaagattggctttgtggtgatcattgttgaaggtggggtgatggctatgtgaaggttcactatatatactccctactgttgtataagtttgaaattgtgcataatagatttatttaaaacacaaagcatagaaatatctactataatattatggtgagagcaaaatttgagggggatgtacacctgcattttcgaagaatatatacatttcggagaccgaattcaaaatgaaaaaccgggctgctgtcccgcacggagcctctgggcgccgctgtcggccagtgcagagcaagcgctgacgccggggatccgtcagcctctggcctgggattccctgcgcagccaacaacagaaagaagaaaaccagctcccacacagagcctcccggctgcgcagacctttcccagcacagcggattgccagctccgagacccgggactcctcctgtcctgggccgaatgctcttttagcgcggtagagtgcactttctccaactggaaaagcggggacccagcgagaacccgagcgaacgatgggagggagctgcgcgcagaggcgccgggccggcccgcggcaggtgctatttcctttgctgctgcctttgttctaccccaccctgagtgagccgatccgctactcgattccggaggagctggccaagggctcggtggtggggaacctcgctaaggatctagggctcagtgtcctggatgtgtcggctcgcaagctgcgagtgagcgcggagaagctgcacttcagcgtagacgcggagagcggggacttacttgtgaagaaccgaatagaccgtgagcaaatatgcaaagagagaagaagatgtgagttgcaattggaagctgtggtggaaaatcctttaaatatttttcatgtcattgtggtgattgaggatgttaatgaccacgcccctcaatttgataaaaaggaaatacatttagaaattttcgaatctgcatccgctggtacacgactatcgcttgaccctgccacggatcctgatataaacataaactcaattaaagattataagataaactctaatccttatttttcattaatggttagagttaattccgatggtggcaaatacccagagttatctctggagaaactcctagaccgggaagaacagagatctcatagcttgatattgactgccttggacggaggggacccaccaagaagtgccaccgctcacatagaaatttctgtcaaggataccaatgataaccccccggttttcagcagagacgaatatagaattagtcttagtgaaaatctgccccctgggtcccctgtgttgcaagtgacagccactgaccaggatgagggggtcaatgctgagataaactactacttccgaagcactgcccagagcacaaaacatatgttctcattggatgagaaaacaggtatgattaagaataaccagtcatttgattttgaagatgtagaaaggtacaccatggaagtggaagcgaaggacggaggtggtctctctacccagtgtaaagtaatcatagaaatccttgatgaaaacgacaacagcccagaaataatcatcacttctctctctgatcagattttggagaattcacctccaggaatggttgttgccctcttcaaaacacgggatctggatttcggaggaaatggagaagtcaggtgtaatatagaaacagacattccattcaagatttattcttcttccaataactactacaaactggtgacagatggagccctggaccgagagcagacaccagaatacaatgtcaccatcgtagccactgacaggggcaagccgcctctttcttccagtagaagcatcaccttgtatgtcgctgacatcaacgacaacgccccagttttcgaccagacgtcctacgtggtccacgtggccgagaacaacccgccaggagcctccattgcgcaagtgagcgcctctgacccggatttggggctcaatggccacatctcctactctatagtggcgagtgacctagagcccctggcggtgtcgtcatacgtgtcagtgagcgcgcagagcggggtggtgttcgcgcagcgcgcctttgatcacgagcagctgcgcgccttcgcgctcacgctgcaggcccgcgaccacggctcgcccacgctcagcgccaacgtgagcctgcgcgtgttggtgggagaccgcaatgacaacgcaccgcgggtgctgtacccagctctgggtcctgacggctccgcgttcttcgatatggtacctcgctctgcagagcccggctacctagtgactaaggtggtagcggtggacgccgactcgggacacaacgcctggctgtcctaccacgtgctgcaggccagtgagcccggactcttcagcctggggctgcgcactggggaggtgcgcacggctcgagccttaggcgacagggacgcagcccgccagcgcctgctggtcgctgtgcgtgacggtggacagccgccactctctgccaccgccacgcttcatctggtcttcgcagacaacttgcaagagatactgccagacctcagcgaccgccctgtactctctgacccccaggctgaactgcagttttacctggtggtggccttggccttaatctcagtgctcttcctcctcgccgtgattctggccattgccttgcgcctgcgacgctctctcagccctgctacttgggactgcttccatcctggtctctgtgtcaagtctggacctgtagttccccccaactacagtgaggggactttgccttattcttataatctgtgcattgcacatacgggtacaaaagagtttaatttcctaaaatgcagtgtgcccctacattccaatgaagacatggtttgcagtgtttctcctggagccttaattccacctcatggtggggaggatttgacttcacatcctgagactctgacttcggtgagtttctcttttttgtgtgtgatttatctaatagtctactagtttctcatattttaggcatactactttattttcatatctagaatcatatgtttaaaatccatagctttttacaatattttctcaatgttttttcaattatagttttcactatgtatttggttcataagttgctctatctttttgtaaaataatgtcaccagactgaagatattttgtctttgtcttttttttttttttttttttttgagatggagtctcgcactgttgcctaggctggagtgcagtggcgtgatctctgctcactgcaacctccgccttctgggttcaagcgattctcctgcctcagcctcccaagtagctgggattactggtgcccctcaccacagctaaattttttgtatttttagtagacatggggtttcactatgtcgaccaggctgttcagaaactcctgtcctcgtgatcctcccaccttggcctctcaaagtgctgggattacaggcgtgagccacaatattttgtcaagttctgactatcgaacagaagcagtggtcttggcatctaagaaaacaaacaagtaacctatctattcaaatttgcgaagacttagtgaatttacgatatcttatttatatatttttaaagcctaaaaatattcagaagacaggcccagtggctcacacctataatcacagcactttgataggctgaatcggaaagtatcacttgagcccaagaattgagaccagcctgggcaatatagggagaccccccatctctactaaaacaacaacaacaaaaaaaaacattagcagagtgtggtagcattcccctgtggtcccagctacttgggaggctgagctgggtggattgcttggtcctgggaggtcaaggttgcagtgagccctgatcttgccactgcactccagcctgggcgacagagtgcgaccctgtctctaaaataaataaataaatatgcaggcagggccaagtgtgctgtaatcccagcactttgggaggtggaggtggagaatctcttgagcgcaggaatttgagaccagcctgggcaacacagggagactccatcgctacagaacatttaaaaattagcagggtgtggtggcacatgcctgtggtctcagctactctggtggctgtggtgggagaatcgcttgagcccaggaagtctaggctgcagtgagctgtctaggtgacagagtgagaccctgtctcaaaaaaaaaagacatttctaagaaataaatgaaatactattgcctttgcactcagtctctgtctctgattctctgatagaagatttttgaagaaaaaagataaaatctttgaagagttctatacttggaaggcatagtgacataaacacttctgaacatcctgttctctgtgtgaaagaagtgaacttctataccctttgcatttgagggaacaattgctactgggttgatgggcacacacagttgaagatatgtgaaccactggactttggcctctgatacaaactgcctaagagaagagattatttatactggtattaatgctctgatgaaaacaggtcatttgacataaacacttacttgttaaaaacctatatcactacatctaactttgttttctaaaacttttagtacttcaaattctacgtatttcttttctcattacaatgcaaacagtttaatttgcaactgtaatatatgttcattttagtttgtgattacctgcttaatcatttaaataggtccatttaacttgtatccctgtaagataaagtatgttttacacaaaaaggttaattaaggctcagtaaaactattctagaagagtactttaaaaacctcttacacaatcctaagctaaataagtttaatgaattaagtagttacaattataaagcttcagagtgaattatctcatgagtttatttaatataatctttgtatgaatgtatactaaataaaattggcctattcaaatcacaattttaaattataagacttttctgaatttacctagacactaatatgacctaaaataagtattatttaccttttattaaagtgtgtacatttctgttgggaaaacgtgttgcaaatatatatttaaccaaacattatcttgaaatatttacaatattttcactccactttatcacacctcccctaagaaacctacatatagtaaattatttaaagataggagtggagaaaccaaagaatctatgtaaaatataataatccaacagaatagtttactttccattgcatgtatcacttgggtgcagtaacttcttaggactctgagcgccgctgttcacctactaggagagaaaacgcagccagagctcaatccggattctcagggcttcaactacacaagccccacaaaccggctgctgggctgcagggaagctcactccagaatttaaagtgcccaggctacagagacaccctgaagccacagaaagacaaaggaaccggttgaaacacacaacgtgtccagtgaggactttgcagaattctgtaaccagactacaatggccgctcaaaggaatcgctcaaaggaatcaaaggattgcagcgggctggtcctgctctgccttttcttcgggattccatgggaggctggagcccggcagatctcctactcaattcctgaggaattagagaaaggctctttcgtgggcaacatctccaaggacttgggtctggcgccccgggagctggcggagcgcggagtccgcatagtctccagaggtaggacgcagcttttctctctgaacccgcgcagcggcagcttgatcaccgcgggcaggatagaccgggaggagctctgcgctcagagcgcgcggtgcgtggtgagttttaatatccttgtggaagacagggtgaaactttttgggatagaaatagaagtaactgatatcaatgacaatgctccaaaattccaagcagaaaatctagacgtaaaaattaatgaaaatgtcgctgcgggaatgcgttttcctctcccggaagctattgatccggatgtgggcgtgaactccctgcagagctatcagctcagccccaataagcacttctccctaagagttcagagccgtgccaatggcgtcaagtacccggagctggtactggagcactccctagatcgcgaggaagaggccattcaccacctggtcctcaccgcctccgacgggggtgaccctctccgatctggcactgtccttgtcagtgtgactgtcttcgatgcaaatgacaacgcgccggtcttcaccttgccagaataccgagtgagtgttcctgagaatttgcctgtgggcactcagctgctgacagtcacagccaccgacagggacgaaggtgccaatggagaagtgacatattcattccgaaaattacctgacacgcaattgttgaagttccaactaaacaaatatactggagaaataaaaatatcagaaaatctagattatgaagaaaccggtttctatgaaatagaaatacaagcagaagatggaggagcatatcttgcaactgcaaaagtgttgattacagtagaagatgtaaatgacaacagtccagagctgaccatcacgtctctatttagtccagtgactgaagattcacctctgggaacagtcgtagcccttttaaatgtgcatgatttagactctgagcagaatggacaggtaacctgttccattttggcgtatctaccatttaaattagaaaagtccattgacagttattacagattggtgatacacagagcccttgacagggaacaggtatcctcttacaatatcacagtgacagccacagatgggggaagtcctcctctatcaacggaagctcactttatgctacaagtggcagatatcaatgacaacccacctaccttctctcaagtctcctactttacctatatcccagagaacaacgccaggggtgcctccatcttctcagtgacagcgctggacccggacagcaaagagaatgcccagattatttactccctggctgaagacaccatccagggggtacctctgtcctcatacatatccatcaactcagacactggcgtcctgtatgcactcagatccttcgactatgagcagtttcatgagctacagatgcaggtgacagccagcgacagcggggatcctccactcagcagcaacgtgtcgttgagcctgtttgtgctggaccagaacgacaatgcgcccgagatcctgtaccccgccctccccacagacggttccacaggcgtggagctggcgccccgctccgcagagcccggctacctggtgaccaaggtggtggcggtggacagagactccggccagaacgcctggctgtcctaccgtctgctcaaggccagcgagccgggactcttcgcggtgggggagcacacgggcgaggtgcgcacggcgcgagccctgctggacagagacgcgctcaagcaaagcctcgtagtggccgtccaggaccacggccagccccctctctccgccactgtcacgctcaccgtggccgtggccgacagcatcccccaagtcctggcggacctcggcagcttcgagtctccagctaactctgaaacctcagacctcactctgtacctggtggtagcggtggccgcggtctcctgcgtcttcctggccttcgtcatcgtgctgctggcgcacaggctgcggcgctggcacaagtcacgcctgctgcaggcttcaggaggcggcttgacaggtgtgtccggctcgcactttgtgggcgtggacggggttcgggctttcctgcagacctattcccacgaggtctctctcaccgcggactcgcgaaagagtcacctgatcttcccccagcccaattatgcggacacgctcatcagccaggagagctgtgagaaaaacgatcctttgtctttgttagatgattcgaagtttcctatagaggataccccattggttccagtgagttttattttcatttttacttttgttaaaaaaaaaaagattggtttttactttgaagtttgcggcatgatggtggaaagtgtaaatgctaaaacactgatgagtagaatttgatgtttattaaggttttttttttttttttttttttttttttttttactttctggtaaaattcacctagtctcaatcaaggcctatatatcataaggctttgttatgattagctttgcagaaccttgtagtttatagtgttgttgagtacaatattgacaattcctaagacagacttccatacagaagtgcctgtcaatttatatttcctcctgggtggtcacatattgaaactccagccccttaagcaaccctcttgttctgaaggcaggtctggtaagaataggtaagtatcagaaagaaatcacctctggaaacacaacccaaatccaagaatactcaatgcagttcttcccaaggagaagggcaataggcctttttcaaactacattttatatatttttcaatctatactttgtggtgatagttgcagttgaatatactaagtttttcattaatattgaattaacaatttatttataacaatgtatgcttagatttttccagccctatttataactgataacactgcagtatcctttttgcatacaattctctaatttcacactgctatgtggaagatatagcattttaatttaactttcattgctcaatagggatcctgaggaggctatagagggtgaaattaagaatatttgggattctgcttttgtcttttttgttaaattttctagtgactaaggctgaaagtaaatatgggttgggaagacagataaatttgtacatgttcccgagaacaggagcaagagatatatgacaaagctatttcagtggctctttaatgtataaggaggcaaacacctgaaactctgaaaactctgaaattgagaggcaaaataaacttagagtcaagaaagaaatgccatttctgcagatcagaatataaacaccaaccacagctgtaaaaaagaaaagaatatatgcaacgaagggaaattatataaacaaaggatcattggaggtactgatgagttcatttagttcaatgaaaatagtgacgtattaggtagatctcttaattttattactagtattctactaaatgtggtagtataaagtcaaaaagcattccgaagtttctcaagacccttataattccatgatttttttcaggtcagtcaacatttgttgaatgataggtctgtggaaggaaagcacactctttagggtcatagttattaactattaaaccattgaaactattattttatatttgtgttaatgagagtcaaaattattgtgcattcatctcaaataattctattattttgaaaaatacaggttttttttttaaaaaaaactgctcttgacattgtagctattgtgagaaaatattttgattataattatttaaaagcaatacaggacaccctggatgatggtaatgactagggcaatggttgcattccagtacttaagtatgaaataaggaattattactttctgggtgaatataggctagaattgaagacaaaaaaatttgttgcttatcttcagtacttccagcttcatagataattactcttaaaaggaacaagaatgactgcctctggatggaggaattggatagcaatgggccgtgggataggagacctataaaccttcatgctatattattttgtgcctttttaaattttgaagaaaaaatattcatttattcaagatatatgtaaattcagtaaataaaaagatatgatagttatgaccaagtggaaatatatttcctgatgtaaaaggaatcactgaggaaaaagattaaaatattttggctgtcaactcgtagtttaaaaaaaattccttgaaagaggtagagaaaagtcaagttgcagtcccacacagagcctctgggcgccgccgtcggccagtgcagagcaagcgctgacgccggggatccctcagcctctagcctgggattccctgcgcagccaacaacagaaaagaaaaccagctcccacacagaggctcccggctgcgcagaccttgcccagcacaccagattgccagctccgagacccgggactcctcctgtcctgggccgaatgctcttttagcgcggtagagtgcactttctccaactggaaaagcggggacccagcgagaacccgagcgaacgatgggagggagctgcgcgcagaggcgccgggccggcccgcggcaggtactatttcctttgctgctgcctttgttctaccccacgctgtgtgagccgatccgctactcgattccggaggagctggccaagggctcggtggtggggaacctcgctaaggatctagggcttagtgtcctggatgtgtcggctcgcgagctgcgagtgagcgcggagaagctgcacttcagcgtagacgcgcagagcggggacttacttgtgaaggaccgaatagaccgtgagcaaatatgcaaagagagaagaagatgtgagttgcaattggaagctgtggtggaaaatcctttaaatatttttcatgtcattgtggtgattgaggatgttaatgaccacgcccctcaattccggaaagatgaaataaacttagaaatcagtgaatccgtcagcctggggatgggaacaattcttgagtctgcagaagatcctgatattagtatgaattcgctgagcaaataccaactaagtcctaacgagtatttctcattggtggagaaagacaatcctgatggtggcaaatatccagaattagtattgcagaagactctggaccgagaaacgcagagcgctcaccacttggtactgaccgccttagatggtggggaccctccccgaagcggtactgctcagataagaatcctggtaatagatgccaatgacaaccccccagtgttcagccaggacgtgtacagggttagccttcgggaagacgtgcctccaggcacctccatcctgagagtgaaggccactgaccaggacgagggcatcaactcagagatcacttattccttctttggtgtggctgacaaagctcagcacgtgttctctctggattacactacaggaaacattctaactcagcagcctttggattttgaagaagtagaaagatatacgataaacatagaagcaaaagaccgaggatctctctcaacacggtgtaaagtaattgtagaagttgtagacgaaaacgacaacagcccagaaataatcatcacgtcactctctgatcagattatggaggattcccctccaggagtggttgttgccctcttcaaaacacgggaccaagactcaggggaaaatggggaagtcaggtgtagcttaagtagaggtgttccatttaagattcattcttcttctaataattactacaagctagtaacagatgaggccctggatcgggagcagaccccagagtacaacgtcaccatcgcagccacagacaggggcaagcctccgttatcctccagcaaaaccataaccctgcacattactgacgtcaatgacaacgcgccggttttcggacagtcagcctacctggtccacgtgccagaaaacaaccagccgggtgcctccatagcgcaagtcagtgcctctgacccagacttcgggctcaacggccgtgtctcctactctctcattgccagcgacctggagtcacgaacgctgtcgtcctacgtgtccgtgagcgcgcagagcggggtggtgttcgcgcagcgcgccttcgaccacgagcagctgcgcaccttcgagctcacgctgcaggcccgcgaccagggctcgcccgcgctcagcgccaatgtgagcctgcgcgtgttggtgggcgaccgtaacgacaacgcaccgcgggtgctgtaccctgcgctgggtcccgacggctccgcgctcttcgacacagtgccgcgggccgcgcagccaggctacctggtgaccaaggtggtggccgtggacgcggactcggggcacaatgcctggctgtcctaccacgtggtgcaggccagtgagcccgggctcttcagcctggggctgcgaacaggcgaggtgcgcatggtgcgtgctttgggtgacaaggactcggtccgccagcgcctgctagtcgctgtaagagatggaggacagccacccctttcagccactgccacgctgcacctggtgttcgcagatagcttgcaagaggtactgccggatttcagcgaccatcccacaccctctgactcccaggctgagatgcagttttacctggtggtggccttggccttgatttctgtgctctttctcctcgcggtgattctagctattgctctacgcctgcgacagtctttcagccctactgcaggagactgctttgagtcagttctctgctccaagtccggacctgtgggtccccccaactacagtgagggaacgttgccctatgcctataatttttgtgtgcctggggatcaaatgaatccagaatttaattttttcacatctgttgatcattgtccagccacacaagataacctcaacaaagatagcatgctactggctagcattttaactcccagcgttgaagcagataagaagattcttaaacaggtaagtatttaaaaatgtatttaatcctttttatattacaatatgccaatatattccaatatagtggtattattttaagattctagataacttcttcatagagttcgcaaaatataggtcaaatttatggttatcattattaaaacaaaagtttaaattaaatgcctcagtcttcctactattcaaagacattttaaagcaaactacatgggtaatctccggtgacatttttatgaagtaaaatacctttcggttaaaaatataaaatacaggtatatttttacggcatggtattttaattgaaaccctgatgctactcaatttttctcaagtatttcatcttcatttactcaataaaggaaccttgtaagaattatagttaggcatcctacctgatgattttatcgggaccgtattatttccacttccagaaatgtcgttcctttcagtcggttaaaatcaattggaaccaactacaacctacaagttttcagctccagtaatattttgaaaactttttaaaaattaagcaagcccttttaataattactcctttcgcaggtgttcttggtaaagttttaacgtcacataatgtaagtattgtgtatcatcgtttttaagctctacaaatacgtgtgattcacaaaggtgagcgtaatcatttcttctggaatttcttagtcgttgcaataataagaatgggctctaggcgccgctgctcaccaatcagggaatgggaagctgcgcgccattgagtccctccctcccccgcctctaccacacaaagcggaatgagatggatactcacagatcctgacactggagacttagaagtattttccttcgctttctgatatattttggatgtagtcggcctaggacttcatagatacataagccgattcacaaccaaccagctcgagaaaccgcggaatatcggcttagagcctgccatggcgaatcggctacagcgcggggaccgcagtcggctgctgctgctgctgtgcattttcctggggacgctgcgggggttccgggccaggcagatccgatattcggtgccagaagagaccgaaaagggctccttcgtgggcaatatctccaaggacctggggctggagccccgggagctggcgaagcgcggagtccgcatcgtctccagagggaagacacagcttttcgctgtgaatccgcgaagcggcagcttgatcacggcaggcaggatagaccgggaggagctctgtgagacggtgtcctcctgttttttaaatatggaacttctcgtggaagacaccttgaagatttacggagtggaggtggaaataatagatattaatgataacgcccccagcttccaggaggacgaagtggagataaaagtcagtgagcacgcaattcctggggcgcgatttgctcttcctaatgctagggatccagatgtgggcgtgaactccctccagagctaccagctcagccctaataattacttttccttgcaactgcggggcagaacggatggggccaagaatccagagctagtactggagggaagcctggaccgagagaaagaggctgctcacctgctcctcctcacagctttagatggaggcgatcccatccgaaagggcgcagttcccattcgtgtggtggtcctcgatgtaaatgatcacatcccaatgtttacacagtccgtatatcgcgtgagtgttccagaaaacatcagctccggaactcgggtgctgatggttaatgcaacggatccagacgagggaatcaacggggaagtaatgtattcatttcggaacatggaaagcaaggcttctgaaatattccaattggattcacaaactggagaagttcaagtacgggggtctctggattttgaaaaatatagattctatgagatggaaattcaaggccaagatggtggaggtctctttaccaccacgacgatgttgatcactgttgtggatgtgaatgataacgctccagaaataactatcacctcttctattaattcaattctggaaaactctcctccaggtacagtgattgctcttctaaatgtgcaagatcaagattctggagaaaatggtcaagtctcctgttttattcctaaccacctgccttttaaattagaaaagacttatggaaattattacaaattgataacaagcagagtgctggacagggagttggtccagagctacaatataacgttgacagccacagaccagggaagcccgcctttgtctgcagaaactcatgtctggctgaatgtggcagatgacaacgataaccctcccgtttttcctcactcctcttactctgcctacattcccgaaaacaaccccaggggtgcctccatcttctcagtgaccgccctcgacccggacagcaaacagaatgccctggtcacttactctctgacggatgacactgtccagggggtgcctctgtcctcctatgtctctattaactccaacactggtgttctctatgccctacaatccttcgactatgagcagtttcgagacttagaactgagagtgatagcacgtgacagcggggacccgcccctcagcagcaacgtgtcgctgagcctgttcgtgctggaccagaacgacaatgcgcccgagatcctgtaccctgccctccccacagacggctccactggcgtggagctggcgccccgctctgcggaacctggctacctggtgaccaaggtggttgcggtggacaaagattcaggccagaacgcctggctgtcctatcgcctgcttaaggccagcgagccgggactcttcgcggtgggggagcacacgggcgaggtgcgtacagcgcgggcactgctggacagagacgcgctcaagcagagcctcgtggtggccgtccaggaccacggccagccccctctctcggccaccgtcacgctcaccgtggctgtggccgacagcatccccgaagtcctggcggacctcggcagcctcgagtctctggctaactctgaaacctcagacctctcgctgtacttggtggtggcggtggccgcagtctcctgcatcttcctggtctttgtcatcgtgctgctggcactcaggctgtggcgctggcataagtcacgcctgctgcaggcttctgaaggcgggttggcaggtatgcccacgtcacattttgtaggcgtggacggggtacaggctttcctgcaaacctattcccacgaggtctctctcattgcggactcgcagaagagtcacctgattttcccccagcccaactatggggacacgctcatcagccaggagagctgtgagaaaagcgagccactcttgatagctgaagactcagctatcattttaggcaaatgtgacccgacaagtaatcaggtgagatttatttctctgcctcctaattgttggtgtcttggcacaagtcttttaaggagatgttttttgagcctgttatgaaaactgtttggggggggggtggggcggcatatatttagttcatatatatttagagcaatacatgtgagttttactttgcctttcatgagattacgataatctttcagaacgtttttgtgaaagtcatttttcaatcttggcatattttcttttgatttcaaaggggccattcaactatgctggtttggtttgaagtaagttgaattttagtattatttttctattatcagtgtatgaggctctcaatttattatatatagatacaaattaatgattcacaaacactttttatttccatttcaattttgctgtgccttcactgatttgtagttatattccaccattatttgctattactgctaatgttcaaattttgatcctgttgatttaatagcatgctccctctagctctccttctcatctatctatctatacacatgcacacacacttatacacgtaagcttttctctgagcaattttattttgattcttggtggctggtaatatgcttagatcctgttgactatttcaactttgtctcatttcttcatcctatcaacacagacatattgactggcttttaactactggatttccttgggagataaaatttagatcacattttttcttaagctctagatgtcttttccattactatggtgaagttacattgactgttctgaggaaataattgaattattgaactggtattatttccttttattcttttactttggtgtctgtgtttgtatgtatggaaggttttttaatgtagtaaatccatatatagaaataacttgattttgattcagtgcttctcaaaaacctattttcaaatgtgctaaagatgtctacagatttattcaaatagagtagtttgtgaatatataaatagattgaaggtatttggactttaattaaactgatttagctagtatccttctggctatttttttgttcattttcagtgtagttgggagtcatagattccttctttctttctttataaggtcattcttatggcaaatagtacattcagttcttttattcagaccaacttgttattgaagcttgatagttgcctgacatacatgttatctgaagcaatgtctaggaaagccaaatgaggaaaggagacttatctagggtttttgatcacaggaatcatttccataatcaattcagtcaacactctcacatcacttctaggtatttgccccaaattacttggatatttatgttccctttcaagtttagttttctcatttaggaatttaccttatgtcattagttgtaaactgactatctagggctcggacaaaaataatttcaactgtaggaaaggcaagtcttccaacagatgcctacatttttcttgaagtcaagaaaaatgttcaggtattttgagcatctagggataggatttatacttgtggaattccaaactgagaaaaatgatgtaaggcattgtactttgactggaattagttaaataaaaaggatatgaggtatttggctgggaaaaggagattgttccatattataaaacctcatctaaactaacttcccaagatcgtggagaacaaaaaggaagggttggctttgaaatgtgatattaagagggttatgttgattcggaggtagtgataaagttctgttaaggtataacatatagtcccattaaatagaggataaaaataaaacaccatcacatttcatgttattaattcctatggcaacctactaggctatacctttatattctctttatgatgaaacatgaaacaataatccttttcagaaacctcttttataagtgataagaagggtttggctaactttattctgaatatgccctatatagctttcagtgctcctccagttttctctgataaaactaggaggaaaattatctgcacatcagattgaaaataatactgcatatcatttcatagtggtcaaaattttcccataccacttgatggggatgttttcccacaaggtttttgttctacaacaggagagaagactttgcctagttcttccaatatgtgcattgcttctgcttagaaaaaaacaaacttttaaattctctttgctgggttaatgactgttctatagattcccatctctaaggaatcttctttggtagtaaacactggaaaacagtcactacgaaaactcataaaatgtctagtttcctatacattagtccaacacatcagtctaattctgaatcccattgaattagcaaaggcttccggctgcagttttctaaatagactcagagccctgctgttggccaatgtgctgcaagaactggagcctgggatctaccaggacgatattctgttcagtcacagaagcaagtcggagagtggccaagacttgggctttctgctcctgcaaatctgattccatacggattggggtgccctcaaactgggagcattgagttttctatgtatggaagtaaatattttaaaagcactttgtgaaacattttctcttaacgtcggagactgcagcaacgcatgggaaggatgggaaacagggtgaagcagagaagcaggacccggcagtggcaagcactcttccctttcctgctgcctttgttctgcggggcaccctcggagcagatccgctactctattccagaagaaacggtccagggctccgtggtggggaaccttgcggaggacatgcggctgcatgttcaggatttattgacctgaaaccttagagttagtgcagagaaacaatactttaccgtgaacacggagaatgggaacatacttgtgagtgacagaatagatcgagagtcactgtcttcaaaatcctctgtgtcatacccttagagattgtagcagagaatcctctaaatgtttttcacataaatgtgatgatagaagatataaatgataacccacctcattttccccaaaatagcattgttttacaaatcaatgaactagcaattccaggcattcggtttggcctggaatctgctatagatgcagatgtagggcctcactctctccagagttaccagctcagttctaatgaacatttctctctgatgatggacaagactaaaggcaagaacgctccagaattagtgctggagaagcccctgggccaggagcaacagagctctcatctcctggtcctggaagcaatggacatgggtgacccagtcccaactggcactgctgcaattcaaattgaggtcactgatgccaacgataatgccccagtttttagccaggatgtatacaaagtcagccttagagagaatgtgcccccaggcacctctgtactaaaggtgacagccactgaccaggatgagggtgtcaatgcggagatcacctactctttcaaatccctacgagatgatattggaaatatgtttgtgctagaccatcaaaatggggaaattaaatccaaagacttaatagacttcgaatttcgtagcagttataccatgagagtagaagctaaggatggtggaggcatgaccagcgaatgtaaaattatactagaaatcctagatgagaatgacaatgccccagacgtggtttttacttcagtgtccagttctgtaactgaggacgcagaaccctggacggtgatcactctgttcaaaacacatgataaagattcgagagaaaatggggaggttacatgcctcataaacgaaagagttccttttagaatcgaatcttccgccaataatgactataagcttgtaacagatgggaccctggattgggagcggatcccggagtacaacgtcaccatcactgccactgacaagggcaagcctccgctctcatccagcacaagcctcaccctacgcattggtgaagtcaacgacaatgctccggttttccaccaagtctcctacgtggtccacgtggccgaaaacaaccttcccggagcctccatcccacaagtcagcgcctctgacctggacctagggctgaatggccaagtctcctactccatcgttaccactgacttggagctgcgggcactgtcgtcctacgtgtccgtgagcgcacagagcggggtggtggtcgcgcagcgtgccttcgaccacgagcagctgtgcgccttcgagctcacgatgcaggcccacgaccagggctcgcccgcgctcagcgccaacatgagccggcgcatgttggtgggcgacctcaatgacaatgtgccgcgggtgctgtaccccgcgctggggcccgatggctccgcactcttcgatatagtgccacgcgccgcagagtccggctacctggtgaccaaggtggtggcggtggacgcagattcgggacacaacgcttggctgtcctaccacgtgctgcaggccatcgagcccgggcttttcagcctggggctgcacacgggaacctgctggttgctgtgcgtgacggaggacagccgccgctctctgcgccgctacgcttcacctagtcttcgcagacagcctgcaggaggcactgccagacttcagtgacagtcctgtgccctctgattcccaagcaaagctgcagatttacctggtcgtggccttggccttgatttctatgctcttcttcctcgcagtgattttggcggtcgccttgcacctgcgatgctcttccagcccctctgcctggggttgctttcaccctggtctctgttctaagactagaccaggggtttttcccaactacaatgagggaactttgctttattcctgcaatctgtatgttccctcggattctagaaaaagaagatttaattttctcaccatgacaccagaaacagtccccccacaagatctttctaatgaagtttctctggtagcaagcttcactgaagagaataacaagataagctctaactctgttgctcctactcacgtgagttccaatgaatgtctttcatttacaaatggatgaggtttaattttcaaaccaatattttggcaagaaaatcttaaacatattatatctactattgcttcaggtttgtttgcccactcttaatatttcctgttcctttctgtgtgggccagtaacttcattattagctttcatgtatttttgaaacattttcaccatttttacgggagactttttttttttttggacggagtctcgctctgtggtccaggctggagtgcagtggcatgatctcggctcactgcaagctctgccttccgggttctggccattctcccgcctcagcctcccgggtagctgggactacaggcgcccgccaccacgcccggctaattttttgcatttttagtacagacggggtttcaccgtgttagccaggatggtctcgatttcctgacctcgtgatctgcccgcctcggcctcccaaagtgctgggattataggcgtgagccactgcacccggcccggagacattgtttatacacacacacacacacacacacacacacacacacacgtgtgaaaagtgggtattatgatactgctgtcattgagatattttaattgaggaataaatttttttcctgtgatgtttcttgggacatcaatatttgagtatataaggctttttctttaatccattaactataaattttgaagaaaatgcatgagaaaatggagaaaatgtgttttttttttaaaaaaaattgagattaaggtctcattatgttgcccaggctggactcaaactcttgggctacagtaatcctcccacctcaatctccagagtagctgagactacagttgcctgaaactgtgcctggcagagaaaaaagcttaaaaaaataagaacatggtaatgatttgataatattcagttacatttacttttgattcttgtaattcaagtaaactcaattttatgtctgatattttctcacagctacctatatatttcttcccaatttaaaatatattattttattttatgcctagcaaatatctttacagtataaatatttacgctcatgaaagtacgtagccagttatttcttagggagaattttttccctatattttgatgggcttccaaaagtattaccagtaattctcagtaattacaattaggtcagttacccaggaaaaggtaagtctgtaacattctttggactaccaattttcttttactaagtttcctgaacaataaatatttttgaaatataatgtattaatagaattctggagtacttccattatttccagtcaatgcaagttggaatgcttctactttatgctaaaaatattaatgtttctttttcacttgggttcttgttaagtgtgattctgataatgtatacaatcacatatcatttttaggtttccataatatcatgaaaatttgatttttaagcgttacatgtcaacaacctggtaaagtaatccttccattcaggatcattcaaggaatctatttaaaaatattttccccaaattatagctgaatcagaaagtttaaattattatattatatgatttgtcaaaaagagaaactcctagggagacatctccataataggtgtgttgggggaacagtaatctcaaagcagatgcactaacattataagattaaaatcattgtttatagaaacttccaattcatttaaaagctcattggggaaaaaaaagctcattgggaaaaaaaaaaaaagctcactaaagtttctattaaagcgaatacggtagatttccatccccttttgaagaacagtaggtggagctatttaagatataaaaacgaaatatcctttctgggagttcaagattgtgcagtaattggttaggactctgagcgccgctgttcaccaatcggggagagaaaagcggagatcctgctcgccttgcacgcgcctgaagcacaaagcagatagctaggaatgaaccatccctgggagtatgtggaaacaacggaggagctctgacttcccaactgtcccattctatgggcgaaggaactgctcctgacttcagtggttaagggcagaattgaaaataattctggaggaagataagaatgattcctgcgcgactgcaccgggactacaaagggcttgtcctgctgggaatcctcctggggactctgtgggagaccggatgcacccagatacgctattcagttccggaagagctggagaaaggctctagggtgggcgacatctccagggacctggggctggagccccgggagctcgcggagcgcggagtccgcatcatccccagaggtaggacgcagcttttcgccctgaatccgcgcagcggcagcttggtcacggcgggcaggatagaccgggaggagctctgtatgggggccatcaagtgtcaattaaatctagacattctgatggaggataaagtgaaaatatatggagtagaagtagaagtaagggacattaacgacaatgcgccttactttcgtgaaagtgaattagaaataaaaattagtgaaaatgcagccactgagatgcggttccctctaccccacgcctgggatccggatatcgggaagaactctctgcagagctacgagctcagcccgaacactcacttctccctcatcgtgcaaaatggagccgacggtagtaagtaccccgaattggtgctgaaacgcgccctggaccgcgaagaaaaggctgctcaccacctggtccttacggcctccgacgggggcgacccggtgcgcacaggcaccgcgcgcatccgcgtgatggttctggatgcgaacgacaacgcaccagcgtttgctcagcccgagtaccgcgcgagcgttccggagaatctggccttgggcacgcagctgcttgtagtcaacgctaccgaccctgacgaaggagtcaatgcggaagtgaggtattccttccggtatgtggacgacaaggcggcccaagttttcaaactagattgtaattcagggacaatatcaacaataggggagttggaccacgaggagtcaggattctaccagatggaagtgcaagcaatggataatgcaggatattctgcgcgagccaaagtcctgatcactgttctggacgtgaacgacaatgccccagaagtggtcctcacctctctcgccagctcggttcccgaaaactctcccagagggacattaattgcccttttaaatgtaaatgaccaagattctgaggaaaacggacaggtgatctgtttcatccaaggaaatctgccctttaaattagaaaaatcttacggaaattactatagtttagtcacagacatagtcttggatagggaacaggttcctagctacaacatcacagtgaccgccactgaccggggaaccccgcccctatccacggaaactcatatctcgctgaacgtggcagacaccaacgacaacccgccggtcttccctcaggcctcctattccgcttatatcccagagaacaatcccagaggagtttccctcgtctctgtgaccgcccacgaccccgactgtgaagagaacgcccagatcacttattccctggctgagaacaccatccaaggggcaagcctatcgtcctacgtgtccatcaactccgacactggggtactgtatgcgctgagctccttcgactacgagcagttccgagacttgcaagtgaaagtgatggcgcgggacaacgggcacccgcccctcagcagcaacgtgtcgttgagcctgttcgtgctggaccagaacgacaatgcgcccgagatcctgtaccccgccctccccacggacggttccactggcgtggagctggctccccgctccgcagagcccggctacctggtgaccaaggtggtggcggtggacagagactccggccagaacgcctggctgtcctaccgtctgctcaaggccagcgagccgggactcttctcggtgggtctgcacacgggcgaggtgcgcacggcgcgagccctgctggacagagacgcgctcaagcagagcctcgtagtggccgtccaggaccacggccagccccctctctccgccactgtcacgctcaccgtggccgtggccgacagcatcccccaagtcctggcggacctcggcagcctcgagtctccagctaactctgaaacctcagacctcactctgtacctggtggtagcggtggccgcggtctcctgcgtcttcctggccttcgtcatcttgctgctggcgctcaggctgcggcgctggcacaagtcacgcctgctgcaggcttcaggaggcggcttgacaggagcgccggcgtcgcactttgtgggcgtggacggggtgcaggctttcctgcagacctattcccacgaggtttccctcaccacggactcgcggaagagtcacctgatcttcccccagcccaactatgcagacatgctcgtcagccaggagagctttgaaaaaagcgagccccttttgctgtcaggtgattcggtattttctaaagacagtcatgggttaattgaggtgagtttatatcaaatcttctttcttttttttttttaattgctctgtctcccaagctggaatgcagcggtacgatcatagctcactgcagcctcaaactcctaggctcaagcaattatcccacctttgcctccggtgtaacagggactacaggtgcaagccacctactgtctgcctatctatctatctatctatctatctatctatctatctatctatctattactttcttgtacagacaggagtctcactatgttgagcaggctgatctgaaacttgggctcaggctagcctcctgcttctccctcccaaactgctgggattacaggcgtgaaccacagtgccccgcccttatcagatattcttttctggctgggcgcggtggctcacgcctgtaatcccagtactttgggaggccgaggcgggtggatcacctgaggttgggagtttgagaccagcctgaccaacatggagaaaccccgtctatactaaaaaaatacaaaattagccgggcgtggtggtgcatgtctgtaatcccagctacttgggaggctgagtcaggagaattgctttaacctgggaggtggaggttgcaatgagctgagattgtgccattgcactccagcctgggcaacaagagtgaaactctatctcaaaaaaaaaaaaaaaaaactttatcctctagtttcatccattgatgacacttgctttaatcacttattacaatcacctccaaatgaagattttataattccattgtttcttctacagttgttaattggctttctaccttgaagaagagttttatattctctatatatgtttgtttctatgattctggaagcatggttttctattttattcaatggcctgtaatctgttaatatcaattatttattttgatgctgaaattgtcccaggattggcctttgggactccctttaggctgatttctatgtcctttctgttacagcaagcttgggattatatccaagatttgtaattccaatgtacttacttctgtcagtgtaaacaaagtacgatttctggactagatgacttgggcattgtgggggaggtggaaattagaggtattctctgtttttcctgtaggatcttgcatttcttcctcttgctgcttgtctctttgtgtcgggaacaggccccccaaaatctggccataaactggccccaaaactggccataaacaaaatctctgcagcactgtgacatgttcatgatggccgtaatgcccatgctggaaggtagtgggtttaccggaatgagggcaaggaacacctggcccgcccagggcagaaaactgcttaaaggtgttcttaaaccacaaacaatagcatgagtgatctgtgccttaaggacatgcccctgctgcagataactacctcaatccatccctttatttccgcccatctcttcgtttcccataagggatacttttagttaatctaatatctatagaaatgatgctaatgactggcttgctgttaataaatatgtgggtaaatctctgttcagggctctcagctctgaaggctatgagacccctgattccccacttcacacttctaaaaaaaaaaaaatttttttttctgagcttggagaaatatatcccttagtacacttggcatttataaagcagacatcaataaatttatatatatgtgacagataccaacaacaatccagtccccttccctcataccttatttatgtacatatattttatataatagatataatttattaacaatttataaaattactttgttaatactctatatcattttctagctgaatttatcaatgataatgctcttttcccacttttatttttttcccattgaccatgcagcagttttgtgtagaccgtctgataacaactgatctgtttatctaggggggagaaatctaattcaatggaaaatataaataaaattgtgataaacttttgtaaatagagtggcttttaactacacttgagatggctagcaaattcataaagtgaatttactttctttcaaagttcagtaattctttctggccattagggatatgtccatttatactttctcagtatcccaagtcatttcatggttttaaatcattcatgaacttccaaatatagtgaatttatttcttctgcatttaaaattttatcacttaaatatacaatataccgtattgccatgacgaaaaatggtaaagactatttttcacttctgttatgcatttcattaatacgatatctgtatgtgtttccaagttagacatttcttttgcccatttcctacactaatgatactaatgatgactttgtggaatattcagaattaacaaaatgtgttttgagtgctttttttagtactggggcaaatttgcagtaatatcgcctgctttttacattaaattccccataacttttacaactatgggaaaatttctgaaacgtgcacagattccaagtgttttctgagaactttatgcttattgtagagtggttacagacactgaatgctaaagtgtattactctttgaaaagcattgcttgatttcttttggtgaattctgtaaaggtgcagggaaacataacgtcccaattattttttctttcttctttgtttgctgcctatctactttgaaagatacaatagttaaaacccagaaaagagattggaaaccccttagagaatgaaagacatccaagggctctaaaatgcggcagttgctgcttctgagaccaaaaaagggggcaaaatatagagtgtgtggttctacttgtgtgattttttgaaagaaagtatttgaatttatctaaaaatactaaatttgtatttacattagttttcaaatagaatttaataagtacagtgttctataggtaatattgagagaaatagaggacaatgaaacctctctcctccatcatcttgtatgaactaccaaaatgtttatcatatggacagttctcatatatagtcaaatagaaagaaagacataataggaaaacaaatgacttgggaaactaagctaacatggtctaattattctgacctctgctcacctaacttgatttaggaacaaatcattgagagttagagcatgaatagtcaagactgttagaccatatctcaaatatcagtgacttcaatcaactatgtttccagtttaagctgaataggctttattaaatagttgttgaatgaatggataaacaaataatgtactctggggattacctgataccaggattctgaattttcagatgtatcatagaaggatagcagctttgcaattaggtaaattgttaactgtgtcacctttagcaagttatttaatctctttgagcttcagcaaagtaggaataatcatatctaatttgaaaggtcgtggtgatggctagggctaacaaaaatctgattcacaacatgcaattaattaacagtagccatttttagtggttgaccaaaaaaaggatttatattttcaatgccagcacactcgatgttctgttgggaaaaataataatgatttttgtgtgcttctccatatggtataatggaatgatttgtggatggaaataaaactgttctaaaatttttgtgacagctggtttaaaaatcttaagtgcctaggcacattcttgattgagaagccacagttttaggccataaaagatgggggaaagatttttatatgagacaattttgtgagtgttactttttctttgtctgaaccatagtgaaatctaaacaaggatcttgtgaaacttattttaaagaagcagtttacttcaatgggatcttagataatttcaccagaaaatggatcaccgaaaccagaaggctggtgatcattatttggtttgggccatataagaattgaaactaacggcttagctttaggatttttaggacacttgttgataatttaggattcataattaacatatgtgttgattgttttctgagactaactgggcaatgggtttggatgtgtttacatttattctgattccagtcataaaattatgtcaaggactttccttgtctttttatgtgtatgacagatgtgtatgtatccatttcatctaacaagttaaagcgttcagctataatttaaaatttgtagcttcactgttttatagtacctaaaattggaatgtaatcagtcagaagacattcatccactgctttcattccagaagtattatgctttttgaagcagcaatagcataggaatgttgaggagactatactatacttttatagcatatttaatctcgtagatcacttttcaatgaattataaggctgatgacaaatgagcaaattgtatcagttttctttatgacatgtaacagagtatagctgtgatcatgaattggatagttctggtgtaaaaatctgctttatccccatataagatgtcaggttcagaaaagcaaacacatagtttcgaagagatgttgatcaaactgatgaggctaaatctcaagaaagagacacagttaccctctaatgttacactttgagttcacctttttttttttttttgagacagagtctcaatctgtcgccaagctggagtgcagtggcactatcttggctcactgcaacctctgcctcctgggttcatgctattctcctgccttagcctcccgagtagctgggactacaggcacacgccaccacacccagctaatttttgtatttttagtagagatggggtttcaccatattggccagaatggtcttgatctcttgatcttgggatgcacccaccccacctcagcctcccaaatagctgagattacaggtgtgagccaccatgcccgaccactttgagttcacttttaagaaaccatacttaatggaaaattaccagtaacagggcatactgtttaggatgcattcctaaaatattaatggcaaaagatagccagcctatggcaaagctaattggaaaaaatattttataaaggatgagacttctggataccatatgggaagggctctggttcaggaaaatgtttttaaaaaactgtcattgaagagaccatagaatcaaacaaaataatttaatctgtatgtaaaagaagttggtaccaccataatttttcttatacatgtcatataaggatctactctgtgtattgtcattgagggcagatataatttcttagttcatcattaactctctgaagtatttcacacagtagtttgtacaccttctaagtactcaatacaatgcttgagttcaattattggaaagtggtctcttggagaaaaaagaatcatagtgcaaaaccaattattttacatggacttttcctctatatctaagccctaataagaggcagctgtctgatatacatacatacatacatacatatatatatatatatatatatatatatatatatatatatatatacacacacacacacacatatatgtatatatatatttggagtaggggatggagtcttgctctgtcacccaggctggagtgcaagtggtgtgatctcagctcactgcaacctctgcctcctgggttcaagcgattctcctgcctcagcctctccagtagctgggattacaggcgcctgtcaccatgcccagctaattttttaaaatatttttagtagagacagagtttcatcaagttggccaggctgctcttgaactcctgacctcaggtgatccacctgccttggcctcccaaagtgctgggattataggcatgagccaccgcaccctgccaactgtctgacttatcttaaaaggctaaggacctggtttgtttgtcaaattttgaaaatagatgcctcagttcataagatttccatattgtgtggcaggcgcctgtaatcccagctactcaggaggctgaggcaagagaatcacttgaacccgggagacagaggttgcagtgagctgagatcacgccactgcactccagcctgggcgacatagtgagactctgacaaaaaaaaaaaaaaatccatatgtgaaaattcttagaagcttcctatacaatttcagctgaagattcagccaacagttcattctgagactgtgttccatggaaaaagtaaagcccaggcatggaagtgggaatggaaagaaagattctaagcctacaaatactcaaacatcaagaagaaataaaaataagtcatcacttcgacttcatgtgctaacatcactgaggttataaattcccaggaatattttattgcgggagcaagactgcactgctgcctttcagcttgcaaattccagtgagaaacgtctttctctctgctctcaactaactctacagaacgctgtcctctcatttcttcaggctgcagttctagagtagggactcagagtgccactgttggccagtctggaaacagagataaatgagccaatccccagacattccggcttggtggcttttctaatttcatggaatgcaaatccaagagcagacccacaacattcctattatggctcctagttctacaaattataagcaggaacggaacggatttacaggcaatgagttcagctccttcttggctggagattctataatccaagaagagtttgaaaaggggcttatttgggctggagcagcagcaactctaactgtggaaaaggtggggaatggtgctggactgacagtctgggtagaaccaaggcgactactgcctcctttcctgctatttctatcctgctgggcattctctatgatgcagatccgttattcagtcctagaggagctggccaagagtttggtggtgggaaaccttgccaaggatctgggactcagtgtcgaggacatgcccacttgaaagcttcgggttaatgctgaggaataatacttcattctaagtggggaaagtggagacttacttgtgaatgactgaatggatcaggagcagatacgccccccaattatagcttgggccataacgctttgaaatagttgaaggccaggcatggtggctcacacctgtaatcccagcactttgggaggccgaggcgagcagattacgaggtcaggagttcgagaccagcctgaccaacatagtgaaaccctgtctctactaaaaatacaaaaattactgggcatggtggtgcaggcctataatcctagctactcggggggccgaggcaggagaatcgcttgaacccgagaggcaatcgcaccactgcactccagcctgggtgacagagcaaggcgccatctcaaaaaaaatgaacaaacggtagttgaaaattctttaaatgtttttcacattaatatggagattcaggatatgaagaatcatgcaccacggttcagcaggaatgttattaagttacgtatctctgagtttacccagctggaacaagatttgcaacagaacctgcagaagatcctgatgttgagagaaattccttacaaaattatcaccttagcagcaactctatatttctctttgaagtaaaagtgaccaacagtggaaagacatatgttgatcctgtgttagagaagctgcttgactaggaaaagcagagctcccatcccttagtgctagcagccttagacggccccccaacaaagcagcatcactcaactcctgatcctattggttgaagccaatgacaaccctgtgttcatctaggatgtgtacagcgtcggccttcaggaagatgtgcatccgggcactcctgtgctgagagtgagggccaccaaccaggactagagtgtcaaggcagagatcacatatggcttcacaacccagagtacccatatctagtttggccttgatcaaatagtggagaaatgaaaactttaagtacattggacttttaaagatttttaatttccatggttttggtagcaagtgacagagagggactcattgtccagtgtacagttgagaccgaatttctagaagataatgacaatatcctagaggcgatttttacttctaattccacaatgattcccaaagattctgcaccttggacagtaatcactgtccaggatttaaatcacaagatctttaaatcacaagatctggattcgggagaaaacgaggtcacatgtctgatataagaaaatgcaccttgagaaaaatcttcctccaataattaactacatgcttgtaacaaatggggccgtggaccaggaacagacccaaggtataacatcagcatcactgccactgacagaggcaaaccaaccctctcgtccagcccaagcatcaccctactcattggcgatgccaacgacaatgctctggttttctaccaggcctcctacgtcgtccacgtggccaagaacaatcttcccaaagcctccatagtgtgcaagtagacacctccaacctagacttgggacccaacagccaagttccctattccatcgtggccagtgacctggagccacaggcgctgtgattctaggtgtccttgagcgcacagtgcgccttcgaccaagagcagccgcgagccttcaagctcacgctgcaggcccgcgaccaggactagctcgcgctcggcgtcaacgtgagcctgcgcgtgttggtggacgacctgaatgacaacgcaccgcgggtgctgtaccccagctctggagcgcaatggcttcgcgctcttggatatggtgctgcacgccgcggagcctggctacctggtcaccaaggtggtggctgtagacgcagatgtgagacacaatgcgtggctgtcctaccacgtgctgcaggccagcaagcccaggctcttcagcctggaatgcgcaccgacgaggtgctgacagctcgcacgatgggccacaggaaagcgactcgccagcgcctactggtcgcggtgcactgcggtggacagccgctcctctcgctaccgccacgtcaccaccactaccgcccctcgtcgccgacagcctgcaggagactctgccagacctcagcgatcactctgcaaagctacagcctgaatccaaaattaatttatatctggtgattgccttagctttaatttcctttttattcttcctgattgcattgtttgtgctggttttaaagtgccgaagaccccaaaatgatcctgtctgagtctttcccacggatgtctatcccgcgctaagccccaggtttctgggtaactgtagctctatgatgccatattcctaccaggtgtgtgcttctcctacgaatccagggctgagtgaacttcttttttgaatccctacccctcaggactcaatagcagtttcactgcagaaagccccttggggaaggggatgattgtgattattctaattgcttgggcagaatccactctccaaggtgaaaaattcttgatgaaactaagttcagtcacaagcaggttttcttctagcattaaatattttcagagatctcagtaaaaagcatttctagcagcaagaccaaaggcctaagatgagaaatatttggcatggtgagcttgagggacagtagtcaggcagacaagagtatcagacatgccagagcatttggggcctgtaggtaaggagcatgttttgattatatatatttgtatgtgtttgattatattttataattttactttgatattcaaattgtactgatccaaaaataagggagggacaaatcttggccattgtagtatgagagatgtaaatttacaactcagaatccctgcttatcacttctccttcagcacacaactgtttcattttctatttaagaaacttcctctcactgcaaaaagacattctggctgataaagttagcctataatttcagtaaatctaagaatatgactaatggaagttgccagacctaaactttgaaaattattgttccactgaagagcgtcttatgactgagtgttccagtctccttctcaagctgaaccttgcttttcaaaccagattaagaacactatcataagttatactgcattttatttccctacccatgtccactgcatcattctctatagtacaaagagcttgtctcgccaggcgcatctataatcttagcactttggggcgccaaggcgggtggatcacttgagcccaggagtttgagaccagcctggacagcatggcaaaaacccatctctacaaaaaaaaaaaacaaaaattaacaaggtttagtggtccatgcctgtggtctcagctacttgggaggctgaggtgtgaggatcacctgagtctggggagattgaagctgcagtgagctgtggttgcgctcctgtactccagtctgggtgacagaattagaccctgtcccaaaacaaacaaacaaataaagagcttctctccttatgacttatttaaagcttgggaaattgttccaattcaaatgctttaaatggacttgagctaaaacagaatgtggtatatgaaatgttcttataatcaggtgattgtaaaaattgatccagataatgttagcatagcattttactgaactagtagtttacaaacacttcaaaaattatagaataacatttgcatataaaattcctcatacatttccctatcagtgaattggaagcttacaatatacaatattaccaaaaagacaaaaaaaatgaaaaggaaacagttacctttggaaaacataattaggtaaaatgggtaatatggaaagtctgaaaactgaaaaaattactgataagtcaagagaaaaggaatattagtaggaaaattcataaaagtgtgtctgactactcacagcaggtttccttattggtatgtattctgtggtccatctaagctatgttaattttattttaaatgctacctgggtattggcttctaaaaggaattcagtaaatcagataatttggcatcttcaatctagattctgatgctcacctgaaaagtctgctaaggattggaaaccaagaaaagtgaagtatctcaacagatatgtgtcacttgtgtgtactggattttttttttttttttttttttttttttttttttttgagatggagtttcactcttgttgcccaggctggagtgcaatggcatgctctcggctcactgcaacctccgcctcccaggttcaagtgattctcctgcctcagcctccctagtagctaggattacaggcatgtgccaccacgcccagctaattttgtatttttagtagagacggggtttctccatgttggtcaggctagtcttgaactcccaacctcaggtgatcttccctccttggcctcccaaagtgctgggattacaggcatgagtcactgcgcccggtcgcgtactggatttatattgtgtaatactttgctctagcagtatagtaggtgagacagtgactgtgtctagtgagcaaaaggcacttatttgacacttttgactcttcctttctacttaccttatttaaaattgatttttgcatgtggcatgatgcaccagttcattgaggtaggggttgaagttatttcccatttttttcaataccatttattaaaaatattttcctctttctgttgaatttgcttggtgcctttgttgaaagtcatttcactgatatatgtagttctatttctatattcttgatcatgtttcatttgtctattcttttactaatagcacactgtctcaattattgtagctttatagtaagtcttgctacaaagtcttactacaggacaaagcttgtaggatttttgaatgggatggcattgcatctatacctttatcagggaaagagggaaggagggaggaggatcatcttaacaatattgacacttcaaatccatgaacatggtatatatttccatttaattaggtctttaatttctctcagctatgttgtatagttttcagtgtagagaggtcatgtatatttctcattaaattgtccctacatatttgatgttttctaatgttattgtaaatagtatttttaaaattgtatcttctaattgttcatttctagtttacagaaaaatgaaaaactatgtttttatgtattctatatgcttttgaaaagtaagaggtgcaaagtgctctattcttacactatattgtgtgagaatataagtcgaaaccactctgcataagttcaggcttccattctcttcagtttgtaggttgagagaacccatccagaaacagtaaacattggtgtctgcccaagtctggtcctgggtggttcattcattcatttacataacaaatatttattaactgtctgctatatgcaaggcactgacctatggactaaggatgcagcaatgaacaaggcatatatgattcctgagttaatgggccctattctaatacatgatattttacaggtctgataaaagccaacaaggagaaatacaaaagcactaagagaaagcttatagtagggaagcttcgcctaatctgaaggtcaaggaaggctttctttttttcggaaagtgatatttagagagatgaatagattaataggatgagtagaagttatctaggtaacaaggaaagtaaaaaagaaattgtcaggcagaggaaatagcatgtgtaaagatctttttaaaaaataaaaggtgtgactcaagcaatttaaaagggctagggaggctagaaacagaaaataaatagatgaaactaataaggcagggagagccttgtaaatcacacttaaaattctggattttgttctaaatacccttgtacttaggagctattaaaatattttaaacaaggcagtgacaagatatttgaattattaagcttactctggctgctatatggagaattgatttatgagggttataaatagaaataggaagataagataggagactatggcaatattcctggtaagaaatggaagaagagctggcttggattaaaggggaggcagtggatgtagaaataaatggatgaattatagatatatttaggaaatgggttcaataagacttaataatggaataggtggaatataaatttcatgagggcagggggtgttttgtttattattatattcctaggtgtctgaaaatattgttgtgttgcctggcaagtggtagatcttcagtgaaatattattaactgaataaatacaatggataaatggggagcagggattaagagtgattcctgggtttccacattaaggaactggatggacaaagctaccatttgatgagaatggaagactaaagaatgatagatttaagagaaatcgagttgagttccagccatgttcatttgaaggatctgagaaacagtgcagatattcagtgtgtgattagacatatggtcatcattcttttttttttttgagatggagtctcgctctgtcacccaggctggagtgcagtggccctatctctgctcactgcaatctctgcctcccaggttcaagtgattcttctgcctcagcctcctgagtagctgggactacaggcgtgcaccaccacgcctggctaatttttgtatttttagtacaagacagcatttcaccatattggccaggctggtctcgaactctgatctgcccgcctcggcctcccaaagtgtggggattacaggcgtgagccaccgcgcccagccggttaccattcttttactctgagttcttccattgtgatcatctagtcagatgggtagatccttataaggctgagcataataagcttcctgatagctctacactggtatgttttggggttcatggctgagctacttttgtgttttatttatcttcctgatctctttttcactgtaagaaacatccagcacccagggaaatttgctgtctaattcatactccactcttcagactagtcctagtgttcagttttgttttgttttttttctgtgtctggaattctattaaaatgtgtcaggctgttttaatttttgttgtttaattttctttcacatgattatatgtgctccatggatttttttgtttgtttgttttttgtttttgtttttgtttaagcggggtcttgctcttgtcgcgcaggctggagtgcaatggcttgatctcggctcactgcaacctccgcctcccgggttcaagtgattcttctgtctcagcctcccaagtagctgggactacaggcacatgccaccacacccggctaatttttgtatttttagtagagacgggtttcatcatattggtcaggctggtctcaaactcctgaccctggtgatctgcccacctcggcctcccaaagtgctgggattacaggcgtgagccaccgcacccggaggaaatttttaacctcagtttttcttcaccatctgtaaaactgcatagaaggaatgtttaggataaaagatgcataacaatcataacaaaattgttgggttttaatgttatgagtacacttggaggattctatgtccacacataccttaaacatcctatagagtccttagcattttaaagttgaaaccaacagtatgaatgatggtagaattttcccccccaggaagttagaactgttccatatcttgatagagggatgggttataaggatgtacacattttccaaaactcattgaacttaagagtcttgcatgtgactgtatataaattatactttaattgaaaataaatttaagaaaataaaattggctgggcgtggtggctcacgcctgtaatcccagtgctttgggaggccgaggtgggtgaatcatctgaggtcaggagttcgagaccagcctggccaacatggtgaaactctgtctccactaaaaatacaaaaattagctgggcatggtggcggacacctataatcccagctactcgggaggctgaggcatgagaatcgcttgaacccaggaggtggaggttgcagtgagccaagatcatgccattgctctccagcctgggcaacatgaacgaaatgccatcttaaaaaaaaaaaattaaaagaaaagaaaattagcctcccccaccctcactatacctcagactcacccctgaaagatcactactattcatccctggttatgtacacttacaaacattttctgtgtgtatgcgaatgtatgtgtggggttttctttgcacaacaggatcattttacagtatatatactgttgtgcaacttgctctttccacttaatatctcaaggaatcttttctttgaatctttatagccatgtacctcaatcttagtagttttctttattttatttttgaataggaaatacatttacatggttttaaaaatcaaaacaatatactatgtatatattgagaagtctgacttccatccctatcctactcctattccacccttgcttcctcctgtcccctgtaggtaaacattttataactttattaagcatcctgtcagcatttcttatgcaaatatgtacatatatttttatttccccattttttttacaaaaagataaaatactatacaccactttatatcttcctttcttcacattatatcctttaaaaatatttccatattggccgggcgcggtggctcacgcctgtaatcgcagcactttgggaggccgaggcgggaggatcacgaggtcaggagatcgagaccatcctggctaacacggtgaaaccccgtctgtactaaaaatacaaaaaaaaaaattagccaggcgtgatggcgggcgcctgtagtcccagctactctggaggctgaggcaggagaatggcgtgaacctgggaggcggagcttgcagtgagccgagatcgtgccactgcactccagcctgggcgacagagcaagactgcaactcaaaaaaacaaacaaacaaacaaaaaagaacttccatattaatatatagaaagctgttttttttaacagttgcttagcattcctttggattattaaccagtctcataaatgagcgctattgaatagccctgtacctacatcagtttttacatatgcagtatatctttgggatgaattcccagaaatggaattgaaattgctgggtcaaagaggaaataggtgtaattttcttaggtattttcacaagaagtgttaattctaactttctgttttgaaatgatttcaaattttcaaaggagttgcaagaattgtacaaagaactgtatctccttcacccggatgcaccgggtgaattatatgtattatataattgtatctgtaggccaggtgcagtggctcactcctgtaatcccagcactttgggaggctgaggcaggtggattacttgaggccaggagttcaagaccagcctggccaacatgataaaactccatctctactaaaaatacaaaaattagccaggcctggtaccccatgcctaagggtgaggcatgagaaatgcttgaacctgggaggcggaggttgcagtgagccgagatcgcaccactgcactccagcctgggcgacagagcaagactctgtctcaaaaaaaaaaaaaaaaaaagtaaaaaagttttttaaaaagatgtatctatatatacatatttacatacacacccaagtgtgtatgtatatatgtttgtgtgtatgtacacaaacacattatttttatatgatatgatttttttatgacatgattatttttatgacatttgagagtaagttgtagaaattatgtttctttattcctaaatacctcattgtgtatttcctaacaaggacattcttttatataattaaattttaataataaaaatcagaaaatttaacatcaatgcaatataattatttagcctatagtccatatttaaattctaccataccttatagtatattttactatacctcatagtaattttttttagtccaaaatatcacacattgcatttagttgccatgtctcttttttttttttttttttgagacagggtctcactctttcgcccaggctggaatgcagtggtatgatcttggctcactgcaacctccgcctcccaggttcaaatgattctcctgccttagcctcctgagtagctgggactacaggcatgtgccaccacactcccaccacacccagctaatttttgtatttttagtagagacaaggtttcactatgttggccaggctagtcttgaactcctgacctcaagtgatctgcccacctcagctaagtgctgggattacaggcgtgagccaccatgtgtggcctagttgccatgtctctttaatctactttaatctgaaacagttcctcagccttgtttgtttatatgaaactgacatttgtaaagactagaagccatttgtcttgtataatgcctttaatttatatttgttttatgtttcctcgtgattttatatatagagtttgtttgtttgtttgtctgtttgtttgttttgagatggagtctcattcttgtcacccaggctggaatgcagtggcgcagtctcggctcactgcaacttctgcctcccaggttcaagcaattctcctgcctcagcctcctgagtagctgggattacagatgcctgccaccatgcctggctaatttttgtacttttagtagaaacggggttttgccatgttgcccaggatggtctccaactcctgacctcaggtgatccgcccgccttggcctcccaaagtgccgggattacaggcatgagccaccgtgcccggacctcatgattgtatttatttatttatttaatattattattattatttttttttttttgagatggggtcttgctctgtcacccaggctggtgtgcagtggtgcgatatcggctcactgcaaccgctgcctcccagattcaagcaattctcctacctcagcctcccaagtagctgggattacaggcatgtgccaccacacccggctaatttttttgtattttttttagtagagacgaggtttcaccatattggccaggctggtctcgaactcctgaccttgtgatccacccaccttgacctcccaaagtgttgggattacaggcgtgagccaccacacccagccttatgattgtatttagactagacatttttttggtagtatattatttagccattgctgtgtaacaaattatcccaaaacttagtggcttaaaagaagcatttattatctcataaattttgtggatcaggactgggtatagctttgctgagtgcctctgcctcaaagtcttacaaggcagcaattaaagtgtcacctaaggctattgtcttatctgaagggtcaacagaggatggatccgcttctaatctctctcacatagttaatggcaaaattaagttccttgtggattgttagactaagggttccagttccttgctggttgttagcttgaggtctacctcagttccttgccatgtggacctccatagggcaaccagcttctgttagagcaagtaaaggagagtgccagagagggcaaatgtgatgaaagccacaatctttttataaacctaattttgaaagtgacatacaaggctaggcatggtggctcaaacctgtaattccagcactctgagaggccaaggagggtggactgcttgagcccaggagttcaagaccagcctgggtaacatgacaaaaccctgcctctactaaaaatacaaaaattagctggtctggtggtgcatgcctatagtcccagctactcaggaggctgaggccagagaattgcttgaacccaggaggcggaggttacagtgagccgagatcacaccactccactccagcctaggccacagaatgaaaccctgtcaagaaagaaaggaaggaacaagggagggagggaggaaggaagggaggtagggaggcagggaaagaccgagaaagtgacataccatcatttttgctgtagtttgttcattagaagcaaaatcacttggtccagcccacactctggggagatgattttctaactccatttgtaataacttattctacttttattagttggcattatacagtaagaaagagctttcttttctcttcttatttattcatatatggctcatgtgttttttccaatgagttatattctattactaacattttttattttgacctcaaattgttttagatgttaccaataagaacctcttcaagctggttcttgtgtccttttgccataactctctcattttcttgaaccctttcttactttctgatataagaaaatattagagactcatactttccttgttccagttctgagatgaaccatttatccaaaagccttgcttcattttagtagggaatagtatttagaaactaagatctgggtgtgaggtatgctcactgctaatgggctgtcactgtttctaggccttgtcagcagacggagctaggaaaaacacacataaacacacccatatttatatttgtacacacactccctcaaaatcgtgagttcatattgatacctccagttctggttcttcctagccttccccctttccatctttgtatttttattttccaacagtaagaaccctggctcccagtgctatgaatatatttactcatttgctccatccactgcactccagcctaggccacagaatgaaaccctgtcaagaaagaaaggaaggaatgagggagggagggagagaggaagagagagaaggaagaaggaagggagggagggaaaactgagaaagtaacataccatcatttttgctgtagtttgttcataagaagcaaaatcacttggtccagcccacactctggggagatgattttctaactccatttgtaataatttattccacttttattagttggcattatacagtaagaaagagctgctgaagatttgcttgcaattggttgtctttaaactgagggtatattgtcaaagtactgtgctgaaaagttacctgtagtatagttatgtgattcattaaaataaagtttgtttctattatgtgcagttttagagttttgccacactctggttgattagtatattttctgttgcttttttgttttgttttgttttgttttgtttttgagatagggtctcgctatgtcacccaggctggagtccagtggtacaatcacagctcactgcagcctcaacctcgtgcacttaagcgatcctcccacctcagcctcccaaatagctggggctgcaagtgcacaccaccatgactggctaattttttaattatttatttatttatttatttattttagagatggggtctcactatgtttccccaggctgaccctgaactcctggggtcaagtgatcctcctgccttagcctccaagtgctggtattacaggcataagccaccacacctagcctagtattcttttttgaatatgtaaaacattaacataaagtcaaaactattaaaaaaaggtgtactcagaaaattgtcattcctcccctataccttctgcctcattcacaccacactctgtagataatcgatttcattagtttgtggtttatcctcactgtgtttctttttgcaaaacgcaaaaacaaaacctatacatatttatattttcttatgtcctcttctttcttacacaaaaggtaacacactatgtaggtagtcctggctttgaacagtttcactataaaaatatttgttactacagcttaaataacataagtctcctaaaaataattcaaattttagttaccatggtatattaactttgagtagttccataaaggacaaacttggctgctagcccttcagtccacagagcactttgaaaataacagatgagcaaaataatgtggccaatcacatgacttctttcaaagtatgtcagtgatcagtcactgtgtgcctataatttagttcatgcacagacagcaaagcatgtagttgtgttgccttccagtgataaacccacataacattttagaaaaatgtattaagaattggccagcaaagataaaagtgcagcaaagaaacaaaagtgataatgttttcagtgaaatttgaattgaacataaatggagttatagaagaaatagctgaccatgggaatgttcacactgctactttcaagaatctctagaagggcagctaaaggagcttagtgaaggtgaatttattgacatgaatgagaaaagtaattgtgatgaaaaggatgaagatgtcccagagaaagtaatgccagcaaaaacttcacattaaaggaactctcagatatttcaaagcattgaaacctccaagaataaataaaatgttggaagttgatccaaacttagaaaggagtatggcaacttgtcaagatgaagaaaaggtgcttattcctttttatttatttatttagagacagagtttcactcttgttgcccaggctggagtgcaatggcatgatctcagctcaccgcaacctccacctcctggattcaggcagttctcctgcctcagcctcccaagtagctgagattacaggcatgtgccaccacgcccggctaattttgtatttttagtagagacagggtttctccatgttggtcaggctggtctcgaacccccaacctcaggtgatctgcccacctcggcctcccaaaacactgggattacaggcatgagccaccatgctccacctgcttattccatattatatgttataggatgaaaagaggccaaactaatcttgacatgttttttacaaggaaataatcctccatggttctaatttttttttttttttttttttttttttttgagacagagtcgcgctctgtcacccaggctggagtgcagtggcacgatcttggctcactgctagcaccgcctcccgggttcacgccattctcctgcctcagcctcccgagtagctgggactacaggcgccggccaccacgcctggctaattttttaaaaaatatttttagtagagacggggtttcaccgtgttagccaggatggtctcgatctcctgacctcgtgatccgcccgcctcggcctcccaaagtgctgggattacaggcttgagccactgcgcccggtgggtctaatgttttaaattacactgtgttaaataaatattagtttgttggttttttttttagtttttttatttctctacaaatttacaaccaataagagtttttaatgctttgacaaaaaatgttaaaggtcatagtacaatcgcatttcttcccattgattattaacatcactttacatagtttcatcttgcattagcaattttgtgtgtgtgtttgtggttttaaggagcggagagtttaataggcaagaaggaagggagaagacagaaggaaggagctcccccttacagagacagagggagcggggctccaaaagaggaggtccccatctaccgcggataccagccaggtatatatgcagaggctggtggaggtgatgtctgatttgcatagggctcaggggattggtttgaccaggcatatcattcacgtagcccgagaaaaagctggccctcccaccccagccttttaatatgcaaacgtagggcgccatggatgttctaaacacgtggagatatgtggggggcagccatgtggccaggaacttgtggggcaagggcaagaaggctgtgggaatcgccaagttgaatggacctagtttctaatggcctgcatttgcatatcaaaggttgctggcctggctcctagagccggggctttaaaagaaacttttccggagatgctttaaaaaatgaaaacttcccaaggaccccttttcctgtctatctgcataaaataatttcttttattatttatttatttatttatttatttatttatttatttatttatttatttattttgagacggagtctcgctctgtcgcccaggctggagtgcagtggcgcgatctcagctcactgcaagctccgcctctcgggttcatgccattctcctgcctcagcctcccgagtagctgggactacaggcgcccaccaccacgtccggctaattttttgtattttcagtagagacgggatttcaccgtgttagccaggatggtctccatctcctgacctcctgatccgcccgcctcggcctcctaaagtgctgggattacagaataatttcttaataactcctaccacattcctccctgtggcgatatcaaactaactgctgttaggaggctttgggcgaccattgcttctggctacttcctgctgaaaaggggcgtctaatggagaacagcagctagggctcctcctggggttgatctaagggtcctcggaagaatggcgtccatgtgtggttcagtttacagcaccgtttggagtttgattgcttctaggcgagaagaaacaattcaagttatagtattgagtatacagagtccaaatatcaatacaagacatataagcaagagagtgcttaataaaggggttaaccaattccataaagaagactggaagtaattaaagagggattgtagccactcggggctgaagcccacattttccctgagcctgtcaataattttgatttgatttttaagtccctgtagatttgcctcttctttactacaggtgttaatcccaaagaagcatgtttcatttaaaaatgcattactggccaggcgtggtggctcgcgcctgtaatcccagcactttgggaggctgaggcgggagcatcatgaggtcaggagtttgagaccagcctggcctacatggcaaaaccccatctctactaaaaatacaaaaaattagccatcgtggtagtgggcgcctgtaatcccagctaattgggaggctgaggcaggagaatcgcttgaacccgggaggcagaggttgcagtgagccgagatcgcaccactgcactccagcctgggcaacagagcaaaactccatctcaaaacaaaacaaacaaacaaacaaacaaaaactgcattactaaatccaataaaaagtcctagtagactcagtgatagtaaaactttcatgcttcctttttgccagtaactattatccctgctataaggatactaattaagcaaaatacgacagcaatggaaactctgtccaatatttcagttagaaggtgctaccatggataaccctattgcaaatagtagagtgaggaaagcagttcccacaaatgtggtgtggtaggtaatttccatctaaaattttacttgccaacatatagaattcccctctgtgggcctacgaagttccttggttttattttcccaaacaaagaaacctccgggttacaggtaccttacttactttcattacctggcacaatttgcaaaataattgcccagaactagcatattgattcacattttcacattacccatccctttttcccccccaccaagctgcagaagatcaccacttgattcacaggaataagcagggccagggttagtctaaaatgtaggcaaaaagcttaaaaacaattaatgagactagggtttaatgacaaatgtatgataagctttggagcaaaatttttctctccagtcctcatttttggtaaaaactaattatgaatgaactttaatcttatacttggcctgattatttgcatgaagtgcagcaagaatggttatttctacataggacttttggattggctttgatgaaacactgttccacaaggaatttcagattagacttttaaagctgagcccagacatgggtttgtatcctctaatacctgtgagttgggttatcctctcctcttgaggtcccaagataaactcagagcttccagacctgttagaaagtgacattcttcactgaccacaggttaggaaccctgtgtggggactgtgtagacaaggtgtgaggccagttctccccaaggggcttttattggctctgcatgtcaagcttgattccttaaagggaaacacaccctttcagttaaagccttggcaaaataaccggtttttccaattgtgttctgttgacaaagaaaaatggattcttgctgcactgatgcgaacaactatattgccgtaagttaagagtacttacagatagtctccaaattttagaggaaccaggcagagaaaaatgaacatgctccaaattttgttcacagtagtataccttacttgattattaaaggccataaatagtttaaaataagtttcctttcccagtccatgcaccaaaatgatacggctctgatgagtggaggaacaacagggttcctggtcctcatgctggtttagataaaatgacacagacacatgtggagtggttttaaggagtggagagtttaataagcaagaaggaagggagaagagagaaggaagacgctcccccttgcagagacggagcgggggttccaaagctgaaagaggaggtcccccacattaacaatttttaaaataccgtacaactgcagaaaatgaggactgcctgtacatactgtttgacactttgtttttttttttaacttatcaactttattttgtttgtttgttttggttttgggtttttgtttgtttgtttgttttggagacgagtctcactctgtcagccaggctggagtgcagtggcacaatcccagctcactgcaacctccacctctcgggttcaagcaattctactgcctcagcctcccgagtagctgggattacaggtattcgccaccacatccagctattggttttggtttttgagacagggtcttgctgtgtcacacaggctggagtgcagtggtgtgatctcagctcactgcaacctctgcctcccaggctcaagtgatcctcccacctcagccttccaagtagctgggactacaggcatgcacaccatgcgcagctaattttttctattttttgtggagacggggtctcactatgttgcttaggttggtcacaaattcacagcctcaagcagtcctcctgcctcaccctcccaaagtgctgggattacaggcatgagccaccacatccagccttaccagctatattgaagtataatttatataacataaaatttgccttttaaaattatacagtgcaatgcattttgacaattgtttacatctgtgtaaccaccatgcaatcaaaatatagaacatttctataaccttcaaaagttccctcatgcccctttgcaatcaattcactacttctccagctccaggcaacaactggtctgcttcctgtcactataaattagtgttgcctctttcagaatttcatctaaatggaatcctataacatatactattttgtatccatcttcttttactccaaagttcttgaaattcattcatgttcctgtgtgtatcagcagcgtgttccatttgattgttgagcagtattgcattgtgtggatatatcacaatgtgttcattcattcaactgttggtggacatttgagttgtgtccagtttagtgctattctgaattaaagtgatgtgaacaatcatgtacaagtatttttgtaggcatattttttttatttctcttggataaataccccaaaacagaattgttttgggggtcatatgaaatgggaagtatatgcttaactttataagaagctgccaaactatttttcaaaatggtaatatcactttacattttcatgagcaatgcataaagcgttccgcttgctacattttctcaccaatgcttcctattgtcaattttttaaattttagcaattctagtgggtgtgtgatactatctcattgaagtttcaactgtttttccctgttgactagagacactgagcaacttttcatgtgttgtctatttgtatatcttcttgaagcattcgttcatctttaactgagctgaacgccttcttaaaattgagctatgggagttttaaaatatatccttgtagctgggcgtgatggcaggtgcctgtaatcccagctactcaggaggctgagacaggagaatcgcttgaacccaggaggcggaggttgcagtgagccgagactgcaccactgcactccagcctgggcaacagagtgagacttcatctaaaaaataataattatacatgtaattatatatgatttttatatatgtaatatatatattcttgatgtgagctctttgtcacatacatattttgtggatattttatcccagactatgacttgtcttttcattttcttagttgtgtcttttgaagagcagaagatgtaattttgataaagcccaatttattttttcttttatagtttgtatttcttatgtcctattcaaaaactccttgcctactgaaaacttatgatgattttctcctatattttcttttagaagttttatagttttaccatttataatttggtctatgaatccttttgagttgatgtttatgtatggtgtatggtgtgaggtaacaatgaagattcatatttttttccaaaggaatatccaattgtctctttggaaaaatatgctgagaaggctatcttttccccaccaaataatcttagcaccttaatcaaaaatcatttggccatggacatatgtaggtgtgggttttttctgggctctctgtgttagatggatagatagacagatacagatatataactgtgtttacacatatgtaactgtaaacacagttatatatctatatatccaccaacagttgaatgagaataaactattgttataagcatatatacacattgtatatatatgtgtacatatacatattgcatatgtatgtatacatatatacacacaaagtatatatatgtatgtatacatatatacacacttaaagtaatggcctccagttcgatccaagttgctgcaaaggacattatttcatgccttttcgtggctgagtaatattccatggtgtatatatatatatgtgtgtgtgtatatatatgtattatgtatatatatatgtgtgtgtgtgtgtgtgtgtgtatatatatatatgtgtatatatatataccacattttctttatccactcattagtcgatggggacttaggttggtttcacatttttgcaattgtgaattgtgctgctataaacatatgtgtccaagtgtctttttcatataattacttattttcctttgggtagatacccaatagtgggattgctggattgaatggtagatctgttttttgctctttagagaatctccatactgttttccatagaggttgtactaatttatattcccagcagcaatgtgtaagtgttctcttttccccacatccacaccaacatctattgttttttgactttttaataatggccattcttgcaggaccaaggtggtagctcgttgtggttttaatttgcattttcctgatgattagcgatgttgagcattttttcatatgtttgtgggccatttgtataccttcttttgagaaatggctatttgtgtcctttgcctactttttaatgggattgtgttttatttttcttggtgatttgttagttccttgtagattctggatactagtcctttgtcagatgtgtactttgcaaagataatattttggatgttatatttccattataatttagttcaaagtattttctaatacaccttgcaatttcttctttgacccatggattattttaaagtttgttattttgtttgtttattttgagacagagtttcactttttttgcccaggctggagtgcagtggcacaatcccggctcccagattcaagcgattctcctgcctcagcctcccaagtagctgggattacaggtgcccaccaccacacccagctaatttttttttcttttttttttgagacagagttttgctcttgttgcccaggctggagtgcaatggcacgatctcggctcactgcaacctctgcctcctgggttccagcaattctcctgcctcaacctcctgagtagctgggattccaggcatatgccaccacgccaggctaattttgtatttttaatagagacggggtttcttcatgttggtcaggcgggtcttgaactcccgacctcaggtgatctgcccgccttggcctcccaaaatgctgggattacaggcatgagccactgcacccagtccaattttttgtatttttagtagagatggggtttcatcatgttggccaggctggtcttgaactcctgacctcaggtgatccgcctgcctcggcctcccaaagtgcagggattacaggtatgagccaccatgaccagcctaaagtgtattgtttagtcaccaaatatgtaagtattacccaaatatatttgtcactgatttctaatttaattgtattgtgatccaaaaatatacattgtatagtttctattcttttaaattcgttaacatttcttttatggcacagaatatggtctatcttggtgagtgttgcttacacacaactgtgtaactgaaaactgtgtattctgcttctcgtggttgttgtatcctataattgtcaactagatcaagttagtaagagtgttgttcagtgatcttttcttcttcagtgtttactgtatttgctaatcccatccagtgaagtttccatttcatatattgtatttttcacttttagaagttccatttgactctttcatttccatcctcaattatcttcatatttttctttaaatttttgagcacatttataatggaggttttaaagtccttgtctgctaattttgtcacctctgtaattcctatgatgattttcttcctggcttggggtcataatttgttgcttatttgcatgtctaataatgtttttattggacagcagacattgtaaatgttatatttttgagtgtttggattttgtctttctttaagaactattgcagtttgttttggaaggctattatgttttttgcagatcaggttgatcttttcaaggcttgtttttaagctttgttaggacaggtctgtagtaacttttgccttgggctaatttagacctaccacttaattctgacttttttgattaatctgagtgttcagcagggtctctttattatggctaaatgaaattcaaacattttccagccctatgtgaccatcaagaattcagctaatagctccctggcagttcttcgcccagctgcagaaaagtgtcagtgcactctatgtatgctcagattattatttagccaaagacttggggatccatattaatattcctggagttctttgtgtagctccattctctttagtactctatcccataaattctggctgcctcaatctcctaatctccccaaactctaatatctattcctcaactcagcaaaaccatggtgttattcttggatttcccctttcctgccccacagtctgaaagttgtctccaggcaaaaaaaatggagatcctagtttgcggatcctcatttccttctccttttttttttttttttttttttttttttgagatggagtctcgctctgtcacccaggctggagtgacgtggcgtgatctcggcttactagaaactccggctcccgggttcatgccattctcctgcctcagcctcccgagtagctgggactacaggtgcctgccaccatgcccggctaattttttgtattttgtttagtagagacggggtttcaccgtgttagccaggatggtctggatgacctcgtgatctgctcacctcggcctccaaaagtgctgggattacaggcatgagccaccgcgcccggcctgcttctcttctcttatgggttagaatcctgcactgtcttttgaacaaatgtctaaaagcttttatcacacattttgatccacttcccagttgttatagtggtatatctggtttcacatgactgaaaggaaaagttttcaccttgctttttgtactaataatatatcctggaaatcattctatataaatttatagaaatcttcatttttaaaatagcttcataaaactccattgtaaaaaccaggtgcagtggctcatgcttgtaatcccacactttgggaggccaaggcgggtggatcacctgaggtcaggagttcaaggccagcctggccaacatggtgaaactccgtctctactaaaaatacaaaaattagctgggtgtggtggtgggcgcctgtagtcccagctacttggaaggctgaggcaggagaattgcttgatttcaggaggcggagattgcagtgagctgagattgcgccactgcactccagcctgggctacagagcgagactccgtctaaaaaaaaaaaaaagcaaaaaaaaaaactccattgtatgtgcacatatcattatctgttcaacccatctatgacttgtcatttaggtagtttccatccaatatttttgcaatataaaaaatgctaatgaagaacctgagatatatatatatctatatatatagatatatatgtttgttgttgttgttgttatttttgaagtatgtacgtataataaattcctaatagtgtgattgctgcatcataaggtaaaggcatatgtagttttgttaaatatagctattccccatcttgcattcctacaaatagatgagaatgtccattgtcccatagtctcctttgcagagtatattgtcaagctttttaattgttgccaacctgatgggtaaaaagatatctccaaataattttaattaaaatttctcttattatgaatgaggttaaatagtttttcatatgtttaaaagccagtttatatctttttgtttttttagagacaggaatcttgttctgttgcccaggccaaattgcagtgatgcagtcatagctcactgtagcctcgcactcctgggctcaagcaatcctcctaccttagcctcccaagtagctaggactacagatggatgccaccatgtccagctaatttttttatttttttgtagagatgtgaggtctcactatgttgcccaggcttgtcttgaactactggcttcaagtgatcctcccacctcagcctcccaaagtgctaagattacagccatgaaccaccacaaatgaccctatatatttttttgaattgtctgttcatgtcttattttcatttttctagtagttttttttttaagtgttttagcctaaatttgtaaaaagtttaggggatatatgaagggactctaaatgtttatgaagaaatttaattaaaagataaaaataaaaatataagctttatttttcaacatgagctccatcaagttcaaggcacttttgtaagcaatgatactagccatttagttcacccctaaagaactgagagtcctgggaatttagccatgtcaatgcagtattttttatattggttactgaagaaaaaatgggtgccctttaaagttgtaagattaggaacaaaaacaagtcagaagaagccaaatcagcactgaaaggtgggcacttaatgattacccaagaaaactctcaccaaattgcccttgcttcatgagaggaatgagcgggagcattgtcgtggtcaggaaggattctggggaagttttcccaggcattttttctgctgaagctttggtaactttctcaaaacactctcataataatcagatcttatcactctttggccctccaggaagtcaaccagcaaaatgctttgaacatcccaaaaaagcgcttgccatgacatttgctcttgaccagtctgcttttgcattggtcaaatgccaccacttccacctcttgtgctttgttttcaggatcagactggtaaagtcatgtttcatctcttgttacagtttttttttttttaagaaacccttcaggatcttgatcacatttgtttaaaatttcaactgaggctgggcccagtggctcatgcctgtaatcccagcactttgggaggccgaggcgggcaaatcacgaggtcaggatttcgagtccatcctggctaacatggtgaaaccccatctctactaaaaatacaaaaaattagccgggcatggtggcaggcacctgtagtcccagctactcgggagggtgaggcaggagaacggcatgaacccaggagacggagcttgcagtgagctgatatcatgccactgcactccagcctgggcaacagagtgagactccagctcaaaaaaaaaatcaagtgaaaactctggtcttaaactgcagctgatctattttatttttattttttttcagacacagccttgctctgttacccaggctggagtgcagtggcaccatcatggctcaatgcagccttggcctcgtgagctcaagcaatcttcccacctcaggctcccaagtagctgggactacaggcacatgctaccatgcctggataatttttttgcagctaatctagatgtaatggttttggcacccatctaatggaaagtttgctcaactttaatttttcagtcagaattgtgtaagctgaaccgagatgtctatggtgttggctattgtttctgctgttaattgtaggtcttctttaattagagcacagacaagatcattttttttcctcccaaattgatgtagatggtcttttgctgtgggcttcatcttcaacattgtctcatcccttcttaaaacaagctagctacttgtaaactgccgttttctttggagcattgtctccataaacttttcacaaaacatcagtgatttcaccgttcttccactcaagcttcatcataaatttgatgtctgttcttgtttccattttagcagaattcatgttactctgataggggctcttttcaaactgttatcttattcttcttagtgcctcaaactagatcctattcagacatggtataacaagttagtatgggtttattttggtgcaagaaatattttgaaatccacacatttttttcataatatgcattttccatgaagtttttgaaaactccttgtattaggaatattagtcctttgtccagtaaacagactgcaaatattttctcacagctcatcatttaccttttggcatttttttgcaatgcaatttttttccctttgtttttgttttttgtgtaatgaatcaatgttttcttttttttttttttttagaccaagtctcactctgtcacacaggctggagtacaatggtgcaatctcagctcactgcaacctctgcctcccaggttcaagtgattctcatctctcagcctcccaagtagctgggattacaggcacatgccaccatgcctggctaatttttgtatttttagtagagatggggtttcaccatgttggccaggctggtctcgaactcttgacctcaagtgatccactcacctcggcctcccacagtgctgggattagagacgtaagccactgcccccggccaaatcaacgttttcttatattgcatttaggttttaagtcatagttagaaagcctttccccacacctaggttatagaaacattcattacttttttcttccagtgctagtacttgcatggtttttggtttccacatttagatccctgatctaattggagtttattcttttgtgtgctgagatatggatctgattatatcttttttcccaaatggctatccagttgtcccaatgccatttattaagcacttcatctttgtcccagtgatttgagatagcatctttatcatgtaccaaacttctatagtgccagaagatttttattttttttagacagggtctggctctgttgcccaggctggagtgtagtggcacaatcccagctcgctgcaacctccgcctcacatgctcaagtgcccgcacctcagcctctcaagtagctgggactacaggcacatgccaccacaccaggctgatttttatatttttttgtagaatgagatttcaccatgttgcccaggctggtctcaaactcctgagctcaagaaatccgcccacctcagcctcccaaaatgctaggattacaagcatgagccaccacacccggctgccagaaaattttaatgatcagaaaaccacaattctttcttcctctgttatatgttgaagtaaaatacttcatttagaaaactaagccgggcacagtggctcacacctgtaatcccagcactttgggaggttgaggcaggcagatcacctgaggttaggagtttgagaccagcctggccaacatggtgaaaccctgtctctgctaaaaatagaaaaatttgctgggcatggtggcgggtgcctgtaattccagctacttgggaggatgaggtaggagaattgcctgaacctgggaggcagaggttgtggtgagccgagaccacgccattgcaccccagcctgggcaacaagagcaacggtaaactccatctcaaaaaaaaaaaaaaaaaaagaaagaaaaaagaaataactcagccatacaaggctacccatttggtgagaactaataataagttagatagcaaggtaatagcaaaatgtgggtgcaaaattaaagcaagttatttctgaggagaatgtaggtctcatggaagattttcatgtggacaaatttagtaaattttttgcaggtagtttcctgacatatttaacatttgtgatatagtaaacaataagaaggtactaaaggctgggcgcggtggctcacgcctgtaatcccagcactttgggaggccgaggtgggcggatcacaaggtcaggagatcaagaccatcctggctaacacggtgaaaccccgtctctactaaaaatataaaaagttagctgggcgtggtggcgggtgcctgtagtcccagctactcgggaggctgaggcaggagaatggcgtgaacccgggaggcggaacttgcagtgagccaagatcaagccactgcactccagcctgggcaacagagcgagactccatctcaaaaataataataataataataaggtactaatatgatccagactagaagagaatagcactaaaatgggagatggggtaaacctgtggttttttttaccttaggcttttgacttccaaaattattgtttttgctgggtgcggtgggtcactcctgtaatcccagcactttgggaggccaaggtgggaggattgcttgagcctaggagtttgagaccattctaggcaacaaagcaagaacctgtctctaaaaaaatttaaaaattagccagaaatggtggcacatgtctgtagtcccagctacttgggaggctgaggcaagaggattgcttgagccttttgaagttgaggcttcagtgagccatgatcaccccactgcactccagcttgggcaacagagcaagaccccatctcaaaaaataaaacaaaatagactgggcacgatggctcacgcctgtaatcccaccactttgggaggctgaggtggatggatcatgaggtaaagagatcgagaccatcctggccaacatggtgaaaccccgtttctactaaaaatataaaacttagctgggcgtggtggtgcacacctgtagtctcagctactcgggaggctgaggcaggagaatcgcttgaacccgggaggtggaggttgcagtgagccaagattgtgccactgcactccagcctggcgacagagtgagactctgtctctaaataaataaataaataaaacaaaataagtaaaataaaataaatgtttgtagttccaaaatattttgatgacataatttcttcttgttctaataaaactacatatgcattggtcctatgacctagtaatcacactattaggaatttatcataaatacacacctcaaaaattacaaaaatacatatataccagcttatttattacagcgttatttgtaattgcaaaaacattgtagatagaatggaggtcacataaaacttattcttaagattcagaccgggtgcaatggctcacgcctgtaatctcggcactttgggaagccgaggcaggcagaccacccgaggtcaggagtttgagaccagcctggccagcatggtgaaaccccatctgtaccaaaaatacaaaaattagctggtcgtcgtggcacgcctgtaatcccagctactcgggatgctgaggcgcgagaactgtttgaaccccggaggcagagactgtagtgatctgagatcatgccactacattccagtctgagcaacagagcaagacttcgtctcaaaaaaaaagatcatagatcatcttatcaaatcaaagtatgcaaaatattcaagtaaacttcagataaatatgaaggctaaaccattcagcttcttcaccaaacccttgaatgtcccacctgtctaaatggagatacatgtttgtttgatttattggttaactgtttttattccatttttcctcaaatgatcccataatttgaccttaggaagctgttcaaatagacacattaggttgaatggaaagactactcgatgatatttaggattttaagaggattttatgtattttttccttgtgtgcaataatttaatagcatcttgaataggattttctgatattactaaccctctgggaataatattaggtaattagacagttagctaatattaaaatatgtatcaggtaatatttattgagagtttcctctgtgccaagcaggatcaacttcataggcaggcgacctgtgcggggacacagggcttcatgcttagataggcccccttgctttgaaggcccctaccctttggttagggctctgctgttaccatcttgaaattcttaataatttttattttatttttttgagtcagggtcttgctctgtcgccctggctggagtgcagtggactcactacagtcttgaattcctgggctcaagcaatcctcccacttcagccttctgagtagttaggacgacaaacacacgccaccatgctcagataagttttttgtttgtttgtttttttgtttttgtttttgttttttgtagagatgggactgtccctatgttgctcaggctggtctcaaattcctggcctcaagtgatcctcccacctcagcctcccaaagtgctgggactacaggcatgagccactgtgcctggtcaatcatttttattaacaagcccaagccctcttttttttttttttttttttgagacagggtctccctctgttgtccaggctagagtgcagtggtgcgatcttaccttcactgcaacctctgcctcctgggttcaagtgattctcctggctcagcctccctagtagctggaattacaggcacccacccccatgcctggcaatttttttgtatttttagtagagatggggtttcaccatgttggcaaggctggtctcaaactcctgacctcaagtgatccacccaactcggcctcccaaagtgctgggattacaggtatgatccactgcgcccggcctccaagccccctatttttattttgcactgaccctacaagttacgtagctaggcttagttatgtttttagcaaggaaagtgtataatctcatgtaccttttgaaagattactcaggtctctgcatgtgaaatggaatttagggaatgcaagagagggagtaaaaataacagcgaggaagctatgatagcatttaaggttgctttgactcaggggtagcagtagatagggtaagtaattgatagtttcaaaatatattttgggagtagtaagcattggtatggattagtaatatactggatgtggggatgcagaaaaaaatattaaaaattacttctgaaattctggctggaatagaagtgccacttaccaggtaaggaaggttggagacataacatatttgagggtgtggtcaaaagatgagtttgacattatgctatgtcatataaaagacatataaaagactacctattttataattcctttttaataaaatattcagaaaaagcaaaactgtggttgcctgaggctgaagctaggaagattgactacagacaagcatgagggaaattttgggggtgatgagagttttctaaaactggattgtggggttggttgcattactgtataaatttattaaaaatccctgcatcgtataggggcactatattgtatgtagaaagctgtgaaaagattttaaaaatgattgacatgtctgtggttatatcaatgagtactattattattcccattttatacataaagaaaataaaagagaagttaaaaataaaagtttcatggttacatagctactaggtgtaatatccagtattggaatttgaatctttttgacactaagaccttactctcgatcatataatacattcactttctattttaaagttatattatagccgggcacagtggctcacacctgtaatcccagcactttgggaagccgaggcaggcagatcacgaggttgggagatcgagaccatcctggctaacacggtgaaaccccgtctccactaaaaatagaaaaaattagccaggcgtggtggcacgcacctgtatcccagctactagggaggctgaggcaggagaatcgcttgaacccagaaggcagagcttgcagtgagacgagatcgtgccactgcactccagcctgggtgacagagtgagacaccatctcaagaaaaaaaaaattatattataaatgctgcatctcattggtcagaagctctcttgaaattataaaacaaagaagaaaaaagataaagactgggaaattgtgttgaatcagtatataaatcctgtatactggtccttccatttcccctagaaataagtgatacaggccaggcgctgtggctcacacctgtaatcccagcactttgggaggcggaggctggcagatcacctgaggttgggagttcaagatcagcctgaccaacatggagaaacccccgtctctactaaaaatagaaaattagctgggcatggtggcacatgcctgtattcccagctactcgggaggctgaggcaggagaattgcttgaacccaagaggaggaggttgtggtgagccaagattatgccattgcactccagcctggggaacaagagtgaaactcaaaaaaaaaaaaaaaaagaaagaaaaagaaaaagaaagaaggaaggaaggaaggaaagaaagaaagaagtgatacaacaagttacagcatctttgtttattatccactgtgagttgtattaccacactttacttggctctttggcaaactatattatctcttcagatcactagggctaggaaggcccactggtaacttgaaggagtaaatgtatcttctaaaaaatgcttacttccagggagattggatccacacaagtgaatacatatatagtccttagtgtatgctatgattattttactatgtcagtagcataaagattgctatattaataagcattaagtgcctgctgtgctagacagtgaggatgcaagtggccaccaaaatagcatggtccctgccctcctggagcttctttttttcttcttcagtgggggaagcagatactttgcttatgcaaaaataattataaaatttaaagttgtgccaagttcaatggaaaaaatataaggtgttctgagagagcataacaaaggatcctggttttaactggggcctaatggaagacctctattaggaaataacatttaaactaagaccagacagacctgtagaaattagcaaagcaaagggagggaggaaaaagcagctttcctggcaaaggaacaatttgtgtgaaggccctgagacagggaagggctggggttctgaccaccctccaagtggtgcaatggaatatagtgagagagggagaagacatgagaacttggatactatgcaaaggatttggtattttaattcaagagcagtatgatgctactgaggagcagctggacaattgtgtgatccaattaaaattttaggaagatgaacctcgctattgtggagaatgcatacacaagggttctgttggttcatgaagaggtcttaagaaaactatgagctgggtgcagtagctcaggcctgtagtcccatctacttagaagtctgaggcgggaggatcccttgagcccaaggagctggaagttacagtgagctatgattattccactgtactccagcctggatgacagagcgagatcctgcctcagaaacaaaaaccaaaaaacaaacaacaacaaaaacaacaacaacgaaaatctcagaaaactacaggccttattatcaagaaaatgacaggccttattattgagaaaactacttacatttttaaaagctgattttcaaaaaccagattgtgaattaagtgatgctgaataggggaaaaaaagactgataaaccagtgtatctctgaataacccactagatcagtgcttgtcaaactttaatgtgttttcaaatcaccctgatgttttgttaaaatgtaagtcatgtctcagtaggtctagaggagggcatttctgcatttctaacaagctccccggtgatgcctagaccattggtcctcacactttgagtagcaagtgattgggctatactctttattctaaattctaaatgtattctatcttctaatgcctatcagccctcttgctggtctggctaattatcaaacttgagcatttaaaactgggggttttcagagattaattgaagtgttaaagacatggaaatataggtcacatatggcttttcatctcttccggaaatatcctatatatccttacttcttttctacctacctaacctatgtgcctaccccttcacttatgttcaaggttctattatacttcaaaaggactctatgcaatcaaagtgatgtccaagacaaatatacagaaatagtatgaggctctaacactttacatctaatggagtggtttgcatcattaattgaggcttactctgtgccaggcactttacctgccttcttcatttaataggataggagcaggaactcttagaggttcatttcttgttcaaggatatacatctcatctctggcttatatcacagtggactcttttattcactatcctaatcattataattttgtttggtgacaacaattctaaatgcagaaaagttaaggctctttattctgtgactaaaggctttgtattttctaaagatttgtggagctttgctgccattatttcaataattttataaagatcctaggtggtaaataggcctggctttttttctttttgaaatcttctccgtcttcttcttcattagcagtgcaacttcttgtggcatatggtacccaagatcttgggaaaaggattgatcaagtaaagggaaacgatagagagagtgtgctctacaactgagatcatgctccttgtgaaagacagggtagggaaatttcttattgctccctggttcttaagaaatgagagctaacaatgacatccagttttaaaagaaataaaatctgaattgtacttttaaattttataagccagagttaaaccaatagattgtaactcctgctaatttgatagtagctccagataatgaggaagtgacagggaatgctaatttcatttggtaagagataaaactgaaattattaatgtctccacggaaatgctaaatgcctccttacaagtagggtccggctaattgtctgtcttccaacaagccagatttgttggtgtttttccagacaatgttgtgtagttttcggtttggttcgatcccctttcttgtgatcaaagaaagtgattcaaatgtttaatgagtcttgatttggattggagacttgcagaacggctagcctcacagccccaaggctggctttccctaaggtaggtttcctatgcaccgatactggcaaggcgctttggctggaaactctggaaggaagccaaaggaaagtgaagttcctggcgctagcgcgtgtcctgctcagagagcccggcgctagctcattcttcgtgcagttattggctgggactctgtgtgccgctgtcggccaatgaagacgctggagatcgggcccctgcccgtcccctttctgcgccccgggatgaggcagagactgaacagccggcgagcaaatcaacggcatccagaaagccatgtcggactcggcgcccagcgcccaagcgctaacccgctgaaagtttctcagcgaaatctcagggacgatctggaccccgctgagaggaactgcttttgagtgagatggtcccagaggcctggaggagcggactggtaagcaccgggagggtagtgggagttttgcttctgcttggtgccttgaacaaggcttccacggtcattcactatgagatcccggaggaaagagagaagggtttcgctgtgggcaacgtggtcgcgaaccttggtttggatctcggtagcctctcagcccgcaggttccgggtggtgtctggagctagccgaagattctttgaggtgaaccgggagaccggagagatgtttgtgaacgaccgtctggatcgagaggagctgtgtgggacactgccctcttgcactgtaactctggagttggtagtggagaacccgctggagctgttcagcgtggaagtggtgatccaggacatcaacgacaacaatcctgctttccctacccaggaaatgaaattggagattagcgaggccgtggctccggggacgcgctttccgctcgagagcgcgcacgatcccgatgtgggaagcaactctttacaaacctatgagctgagccgaaatgaatactttgcgcttcgcgtgcagacgcgggaggacagcaccaagtacgcggagctggtgttggagcgcgccctggaccgagaacgggagcctagtctccagttagtgctgacggcgttggacggagggaccccagctctctccgccagcctgcctattcacatcaaggtgctggacgcgaatgacaatgcgcctgtcttcaaccagtccttgtaccgggcgcgcgtcctggaggatgcaccctccggcacgcgcgtggtacaagtccttgcaacggatctggatgaaggccccaacggtgaaattatttactccttcggcagccacaaccgcgccggcgtgcggcaactattcgccttagaccttgtaaccgggatgctgacaatcaagggtcggctggacttcgaggacaccaaactccatgagatttacatccaggccaaagacaagggcgccaatcccgaaggagcacattgcaaagtgttggtggaggttgtggatgtgaatgacaacgccccggagatcacagtcacctccgtgtacagcccagtacccgaggatgcccctctggggactgtcatcgctttgctcagtgtgactgacctggatgctggcgagaacgggctggtgacctgcgaagttccaccgggtctccctttcagccttacttcttccctcaagaattacttcactttgaaaaccagtgcagacctggatcgggagactgtgccagaatacaacctcagcatcaccgcccgagacgccggaaccccttccctctcagcccttacaatagtgcgtgttcaagtgtccgacatcaatgacaaccctccacaatcttctcaatcttcctacgacgtttacattgaagaaaacaacctccccggggctccaatactaaacctaagtgtctgggaccccgacgccccgcagaatgctcggctttctttctttctcttggagcaaggagctgaaaccgggctagtgggtcgctatttcacaataaatcgtgacaatggcatagtgtcatccttagtgcccctagactatgaggatcggcgggaatttgaattaacagctcatatcagcgatgggggcaccccggtcctagccaccaacatcagcgtgaacatatttgtcactgatcgcaatgacaatgccccccaggtcctatatcctcggccaggtgggagctcggtggagatgctgcctcgaggtacctcagctggccacctagtgtcacgggtggtaggctgggacgcggatgcagggcacaatgcctggctctcctacagtctcttgggatcccctaaccagagcctttttgccatagggctgcacactggtcaaatcagtactgcccgtccagtccaagacacagattcacccaggcagactctcacggtcttgatcaaagacaatggggagccttcgctctccaccactgctaccctcactgtgtcagtaaccgaggactctcctgaagcccgagccgagttcccctctggctctgccccccgggagcagaaaaaaaatctcaccttttatctacttctttctctaatcctggtttctgtggggtttgtggtcacagtgttcggagtaatcatattcaaagtttacaagtggaagcagtctagagacctataccgagccccggtgagctcactgtaccgaacaccagggccctccttgcacgcggacgccgtgcggggaggcctgatgtcgccgcacctttaccatcaggtgtatctcaccacggactcccgccgcagcgacccgctgctgaagaaacctggtgcagccagtccactggccagccgccagaacacgctgcggagctgtgatccggtgttctataggcaggtgttgggtgcagagagcgcccctcccggacaggtaaggtttagcaagtcatgcttgaccctgttagtgcttttttattcctacatcatattgaggaaggaatggagctgtttttttagtgatgaagatgttttcctggtgatgcattcacactttcaactggcccttcctagatcaaagttagtgcctttgtgagatggtggcctgccagagtgtggtttgtggtcccatttcagggggaagatacttgactcatctgtggacctaattcacatcctcagcactcttttgctatcacaactaaccaatcttgctaagggatggttaagctaaaacacaagatctcagcgatcagagtttagcttggtatcatttacattaggaataagctgctggatacctctaaccagtggcagcttctaggaatacaaaaactacctcattcctccacctttcaagtgattgtgacatttgtattaaaactaatagctttttgataattttcctttgtttatacagatcgtgtacctcattctcagataattttttatgaatgaaatgaaattccaggcatcctttaaattttatttcaagcattctactggaaatgatgtgcaccctgcttacaaaatatttttaccttataacagtaatgcatgtttgctagaaaattcagaaaatacagaaaagtatttaaaaaattaaaactataatctccaaacccaaagataaccatttttaattataaaagtaataatttatttcaaaaataaatctaggcaacccaagaaaacataaagtagccagactcagtggtgtgcacctgtagttcttgctgctcagtgcctgaggtgggaggattgcttgagcccaggagttctgggctgtggtgcactatgctgatcaattgatcaatccactgtctgcactaagttcagcatgaatacagtgacctcttgggagggcaggaccatcaggttgcctaaagaggggtgaactggcccaggttggaagtggagaaggtcaaaactgctgtgctatccagtagtgggatgacatctgtgaatagccactgcactccagcctaggcaatatagggaaaccatgtctctttaacaataacaacaacaacaacaacaatcccagaaactacaaaaggagagtctttttggtgcctccagtgttagtccctgtccttccagccttatttttcttaagtatatgcacaatgtgaaaggtagataaattcatatccttagacaggtaaagcattcattaattcagggtggtatgcaaggatactatccaaggcatggtatccatgcaaggtgactgcaaggcctttgccctggagagaaccctatacatactctcaactgtaggagaaacactgttattttgttactcagtgcatcattgctatcaactcttggatttggcagttagtcaaatgaggttctaccatttaccaactaggagtctgtggccaagttactcaatctcctttctaagcctcttcctcatatgcaaaaagggaataataagtgttttataagattcatgcatgatataatgtatgcaaagtgtttagcatggtgcctggcatatcataactgttaaacaattattagccagctcctagcattttgggaggctgaggcaggcggattgcttgaggccagcagttcaagaccagcctgagcgacatagtgagatcctgtctctacaaaaaaaaaaaaaaatgtgttttcattagctgggtgtgttggcatgcacctgtggtaccagctacttgggaggctgaagtgggagaattgcttgagcctgggaggttgaagctacagtcagctgtgattgcaccactacacttcaaccatggcaatagagtgagaccctgtctcaaaaaaaaaaattatcagctattactataattatttttattagttcctcactcacctaaaatctcaaacacaccttagaaatacacatatgagaacaaccaaaaatgacaaagtagaagcacatatgaaaaggctaagaaagcatgaaagccagcaagaaataactgccgctcttctggtcagcctggaaagcaactggcattttccctagaacaatgttttcaaacttggttgcacattaaaatcacctagagaccttttaaaaattctgaaacccaggccacaccccgacaaatgaaagcacagtctctgggggtgggacataggcatcattttttgaaggtccccacttgatcctaatgtgcagacaaatttgaaaaccacagctttgggaggctgaggtgggtggatcataagatcaggagtttgagaccagcctggccaatatggtgaaaccccgtctctactaaaaatgcaaacattagctgggcatggtggcgcatacctgtagtcccagctactctagaggctgaggcggaagcatcagtgagggagaatcagtgaacccaggatgtggaagtttcagtgagcccagatcacaccactgcactccagcctgggcgacagagcgagactccacctcaaaaacaaaaagaaagaaagaaaaaagaaaagcagtactctggaacctaccaatccatcatttagcatatttgtgaagtaaagtgttattctggtatttgcagaaccagaatccagctttattgggccaggcccaatttttttaaaaaacatggtaaggtctcccagccttaaagtattacatagcatagctctaaaagatcactgtaggaagacataaaatggtatttcagtcatctaagggaaaaaccttcctaaagcactagcccctggacaactattatttaaacatctacagctgttcaatagatattgggttctttttggagggatgtgacaaaattcttgtataattagattgtgatgatgattgtatcagtttagtacatgtaaatacactgaaaaccattggattatacactttaaatatgtgatttgcatggtatgtgaattatgtctcagtaaaaatctagagatggggctgggctcagtggctcacgcctgtaatcccagtacttagggaggctgaggccagcggatcacctgaggccaggagttcaagaccggcctggccaacatggtgaaacttcatctctactaataatacaaaaatcaggccgggcctggtggctcacgcctgtaatcccagcactttgggaggcggaggcgggcggatcacgaggtcaggagtccaagaccagcctggccaacatggtgaaaccccgtctctactaaaaatacaaaaattcaccaggcgtggtggctgaggcaggagaatcgcttgatggtggaggttgcagtgagccgagatcgcgccactgcactccagcctgggtgaaagagcgaaactccatctcaaaaaaaaaaaaaaaaaaaaaatcagccagatgtggtggcaggtgcctgtagtcacagctacttgggaggttgaagcaggagaatcgctttatctcaggaagcagaggttgcagtgagccaagatcatgctgttgcattccagcctgggcaacaagaacaaaactcactccatctcaaaaaaaaaaaaaaaatatctagagatgggagaatcatatggctggcataaaaaggtcaagtcaaagatatgtaagattaaggctttacgatgctccagttctagtaaaacagaccaggtacttgttttggtgtgaaattgccaatataagtatagtactgtacatattagttgtttagcttaggtaagtcttttaatctctttaaactccagtttcctcatctataaaataaagagaatatctactttgcaaacttgttgtgagagtgaaaagtaatgcatataaagtccctgtatggagcaagtactcaataactatttgttgaactaaaaatgataatactgatattcaccatttattagcatccctatgtgccagacactgtaaacaattaaaagttatcattctggtacccagagtacagtatgagacagacatgcaaaaaaaaaaaaaaaaaaagataatggagatctgcatagcataagatgcagtgggaccaaacgggaaaaaacacctaaatgagcctggagaaaggaagaaatgatagaggtggtgatgcttgagctatgatctaaaggttgagtagtagcttgtcagacagtaaaggggaaaggacagggcagggaggggccattgcaagaaattccatgcagagggattatggtatttcattatcactgaaccttaaactgtgtgtgtggccgggtacggtggctcatgcctgtaatcctagcactttgggaggccaaggtgggcagatcacttgaggtcaggagtttgaaaccagcctggccaacatggtgaaacctcatctctattaaaaatacaaaaaattagccaggtgtggttgtgggtgcctgtaattccagctacttgagcagctacttgagaggtcgaggcaggagaattgcttgaacccgggaggcagaggttgcaatgagctggtgtcaggccactgcactccagcatgggcaacagagagagactccatctcaaaaaaaaagtgtgcgtgtaaaacagacagtctttgtaggagatgaggtgaagcaagtaggcaggagttagatcctgagttacctttgggccaagccaaggagtttttattttattccatatagatgacagtcactgcagaaatttgaactgatatgcatatatcatgaggtttttttgttttagaaatattattctgtcagtcataagtgaagggactggggacattgggactggaggcaaagagatcttatctctttgcaatagtttgaaagctattgcaatatttgaagagaagattgataaatgcttgaaccagcacagtggcagtacagatggagggagctgactacaataaaatcatcaggacttgttgattgacatgatataggaagtgagggacagggatgagtcaaggctgatccccctagatcctgactaaggaagctgggtggttgacagtgccattcacagagacagtgaattctggcataaacacctaataggtcaggctggtttacacctccatcattcccatgggagaaggtatagaggggtgtgtgtttgtgtgtgtgtgtgtgtgtgtaaaagaacacagaaagccagattcctctttttgacaccagaatattggttcccaccatagtcaaaaggatattcctgaggatcgaggcttggaaaaatattggggaaggataagaactccagttgttgctgctttttttggcagccagtgtaacctaggtaaggacttggttgaattaagaaatttcatgtccagatcaggatggatttttctatttctctgagctctggtgtgtttcccactcagattgcaggtcgtaggtacctacggtgtgaattgtgttgtgtttctgtgcttgtgcaagggagtagctaggttgctgggaggtctggatgagggtgggggtggggtgagatcaagtctccagctccaagaggtcccctggggctaagtgaaaagcttgctcttttgaaatggtcttcgttggtaattaacaaaagatcaagaataccttggtgtcagataaagggaatttgtaggcacaatgctgttggtagctgatctcaatcattcaaggaagctattaaatctatgaacattagcattctgccaggtaaagagatctggtccttagcacctcccagacacactgattctttactgttttgaaacatctccctctcctggcttcctccaccccgcttccatactgtccttgaaatcaatgaatggtaatttagtgtatctagtgtatcactagcaaatgtctgaataagaaaggtttggtttccgctgtgtctcctgttacaatgagaacatgtactgcataaatttaattggctacgttaatgtgtaagccttttctgcaaagagatggatccgtttctgaatattctgcagaagggcagagttttgagtatatggcagtggttctaattagcagttgctccaatacaatcagactgagacggaagctactcatttagaatactggttgatgacaacactggcttgaacaaagtgaccactctccaatggctactctccctctcagtgggccgcaggttgctagggctcaggctgtggctgttttccccgccgaaaaggggcggggtcagtcggtgtgttaggaaaaaaaatgtatatatatatatatgttgtctgcctccccacagagataacaacccgtggaaaaacatgccgttgagcgggaggaaggcgaaaagataggctgggttttttggggggtgggggagcgtggaggatagggtgggctttttcccctccaatgctgcgacgcattaaccctgctgctgttgggacgttctctgctcagcctattggctgagcccgggagccgctgtctgccaatcgggtggtgaaaggcagacaaatctaccccgccaccagcaaaaacggcgcgtaacccttgcggcgccggccgaaccgcgccagagctggcgcggggaaagggagataggtgtctccagctgctgtggctgtttggggcgggtcggcttcatccgcgtctcaggagcaagtagagaattagcgggcggcagcaatgctccgcaaggtgagaagctggacagaaatctggcggtgggctacccttttgttcctcttttaccacctgggttacgtttgtgggcagatccgctacccggtcccagaggagtcacaggaagggacttttgtagggaatgtcgctcaagatttcctgctggatacggacagtctgtcagctcgcaggctgcaggtcgctggagaggtgaaccaaagacacttccgtgtggatttggacagcggagccctgctcatcaagaacccaatcgaccgagaggcactgtgtgggctcagtgccagctgcatcgtgcccctggagtttgtcaccgaaggtcctttggaaatgtaccgagcagaggtagagatcgtagatgtgaatgatcacgccccccgttttccgcggcagcagctggacttggaaattggggaggcagctcctccaggacagcgtttcccgttggaaaaggctcaggatgcagatgtggggagcaattcgattagcagctataggctgagctccaatgaacactttgcactggatgtgaagaagcgcagcgacggcagcctggtcccagagctgctcctggagaagcctttggatcgagagaagcaatcggactaccgcctggtgctgactgctgtcgatggagggaacccgccgagatctggcaccgcagagctccgggtatccgtgctggacgtaaacgacaacgccccagccttccagcaatccagctacaggattagtgtgttggagagcgcaccagcgggcatggtgctcatccagctcaatgcctcagacccggacctgggtcccagtggtaacgtcaccttttatttcagtggtcatacccctgatcgtgtaagaaacctctttagcctgcaccccactactggaaagcttactcttttggggcccctagactttgagagtgagaattactatgaatttgatgtgcgggctcgcgatgggggttctccagccatggagcaacattgcagccttcgagtggatctgctggacgtaaatgacaatgccccttacatcacagtgacctcagagcttggaaccctccccgagagtgcagaacctggcactgtggtggcacttatcagtgtgcaggatccagactcagggtcaaacggagatgtgagcctccgcattcctgaccacttgccatttgccctcaagtctgccttcaggaaccagttctccctggtgactgctggacccttggatcgagaggccaaatctagctatgacatcatggtcactgcttctgatgctgggaaccctcctctcagtacccacagaactattttcctcaatatttcagatgtgaatgataatccaccctctttctttcagaggtcacatgaggtgtttgttcctgagaacaatcgcccaggggacctgctttgctcccttgcagcctctgacccagactctggcttgaatgcgcttatctcctactcactcctggagcccaggaatcgagatgtatcagcttcctctttcatctctctgaacccccagacaggagctgttcatgctactcgatcctttgactatgagcaaacccagacactgcagtttgaggtgcaggcccgggatcggggcaacccaccccttagcagcactgtaacagttcgtctatttgtgctggacctcaatgacaatgctccagctgtgctccgtcctcgggcccggcctggttccttatgtccccaagcactgcctccatcagttggtgctggccacctaatcacaaaggtgactgctgtggacttggattcaggttacaatgcttgggtttcctatcagctcctggaggccccagatcccagcctgtttgcagtctctcgatatgctggggaggtgcggacggctgttcctatcccagctgacctcccaccacagaagctggtcattgtggtaaaggatagtggtagtccaccactctctacctctgttactctcttagtgtccttagaggaagacactcatccagttgtcccagatcttcgagaatcttcagctccaagggaaggagaatctcgtctaaccctctacttggctgtgtccctagtggcaatttgctttgtctcctttggctcattcgtggcactactctctaagtgtcttcgtggggcagcctgtggagtcacatgctttcctgctggcacctgtgcctgtctcaccagatctcgaaggagggaggggcttcccccttccaatgggatcctccgaatccagctagggtcagatgaccctatcaagtttgttgatgtgggaggccactctcatggctgtacacccttggcttctgcacccactcggagtgatagcttcatgatggtgaagtcacccagtgcacctatggcaggggagcctgttcgcccaagctgcccaccctctgatcttctctatgggctagaggtgagacctttgcaggctcaacaaatgcttgagggttattctgatccaggcatatggctaggccatgtcctagagagtactggcctctcagtaagtgcccatagtgatgtcaccatttttgtaagaggtaactatgtggtagacgctgtgctttgtaactgtttcgtgaattaaccagagttgtcacagtttagcattgggggcgggtcatgcctatatctgagtaagaaatgaaagtaattggtgatcaagagccaggctgttgtggaagcatgatgatggaatgtgggagcacaggaggctacagtgcacagggtacagtgcaccaggcagtcacttggacaaaggtggctgttttctctactcttcctgaaagaggggatcagattctgaagtaccttaactctaggttaccatttcccaagggattgaggggaaataaaatctttgtctcccagtatctagtacactgtgaagggacctctctatttgaaacatagagacagcagaaagaggagagaactaaaggaatagagaggcacgcatcagagtggtggcatagatcttttggtctgggtcttaggactcatatcaagtccctactggggatttgaactagatgcggtaaattggaaggttggggcgggttggtcatcacctttggaaaaaacagtaagtgaaatcacttatgtcagaaaactggtttacagttggctgattcatagaaacagccaccctgtgcatctttaagttgagttctcctgaatttggtgaaaccatgaaacctagaagccaagccatccatgcttggcctctgaccaccctcctgggtgacctgattcagccccagaaatgttcccctacccaaaaactgtaacactcattccacatttggggtctggggtgtcagaaaagctaagtcccatgtcagctgacattgagatttccgcaaagcattgctggagagtcagggcaagactttacaaggttcttactaatcttttctctcaccttagcagcattcagcaggatgggggagggtgggggaatacatgggctttgcctctcccagaaggacaagattttgctggttcaagcaaagtggtggaagcttctgaagtcatgcaggaagttgctgggacagaacgctgaggagttttgtatcactttgtcttccctgttgagtaccatctgagctgtcaaactttgctgccaagggggctgaatcaacctgcagcacgaagtgagtggggaggtaggaagcttctgtgacacagatttgcagcctgtgttcccaaggtttccaggattgaggaaactccataattggttgagagcacacagactttttggccaatcagactcagagctgaggtgggagatctgctcttccagcccgcctctcctcctccagctccccagctccactcaaattcagctcccctcccccctgcccacccccgccactcggtgactaagaactgctgcaagcaggcaaacctccgagcagtttttaagaggctggaaggagacataagagacttcagctgctgcattccaagccctgggtctaccttggagacaggacagcacagacttactctccacaaagggacttctgggtcatggggcccaagacactcccacagctcgctgggaaatggcaagtgctgtgcatgttgtccttgtgctgctggggctgggtgtctgggcagcttcgttactcagtggtggaggagtctgagccggggacgctggtggggaatgttgctcaggatctgggcttaaagatgacagatctgttgagccggcggctgcaattgggctctgaggagaatgggcgctatttttccctgagcttgatgagtggtgccctggcagtgaatcaaaagattgaccgagaaagcctatgtggagccagcaccagctgcctgctgccagtgcaggtggtgactgaacaccccctggagctaatccgtgtagaggtagagatcctggatctcaatgacaactctcctagctttgccacccctgagcgagagatgcgcatctcagaatcagcagcatctggggcacgattcccactggacagtgcccaggatccggatgtgggcaccaatactgtgagcttttacactctaagccccaacagccacttctctctgaatgtgaagaccctaaaagatgggaagccattcccagagctggtgctagagcagcagctggatcgtgaagcccaggcaagacatcagctggtgcttactgctgtggatggggggaccccagcccgctcagggaccacccttatctctgtcatcgtgctggacatcaatgataatgctccaaccttccaatcctcagttctacgtgtgggaatcccagagaatgcacccattggtactctgctgctccgcctcaatgccactgatccagacgagggcaccaacggccaactagactattcttttggagaccacacatctgaggcagtgcggaacctctttggcctagaccctagcagtggggcaatccatgtgttgggtcccatagactttgaggagtcacgtttctatgaaattcatgcaagagcccgtgaccagggacagcctgccatggagggccactgtgtgattcaagtggatgtgggggatgtcaatgacaatgccccagaggtgctattggcctctttggccaaccctgtcctagagagcacaccagtgggcacagtagtggggttgtttaatgtgcgagaccgggactcaggtagaaatggtgaagtgagccttgatatctctccggacctgccatttcagattaagccttctgagaaccactactcgctgctaaccagccagcctttggaccgggaggccacatcccactatatcatcgagctgctggccagcgatgctggttcaccttccctacacaaacatctcaccatcaggctcaacatttcagatgtcaatgacaatgcaccccgcttcaaccagcagctttacactgcttacatcctagaaaaccggcctccgggctcccttctttgcactgtggctgcctcagatccagacactggggataatgcccgcctcacctactccattgtaggaaatcaggttcagggagccccagcctcctcctttgtgtatgtcaacccagaggatggacggatctttgcccagcgtacctttgactatgaattgctgcagatgctgcagattgtggtgggggttcgagactccggctctcccccattgcatgccaacacatctctgcatgtgtttgtcctagacgagaatgataatgccccagctgtgctgcacccacggccagactgggaacactcagccccccagcgtctccctcgctctgctcctcctggctccttggtcaccaaggtgacagccgtggatgctgatgcaggccacaatgcgtggctctcctactcactgttgccacagtccacagccccaggactgttcctcgtgtctacacacactggtgaggtgcgcacagcccgggccttactggaggatgactctgacacccagcaggtggtggtcctggtgagggacaatggtgacccttcactctcctccacagccacagtgctgctggttctggaggatgaggaccctgaggaaatgcccaaatccagtgacttcctcatacaccctcctgagcgttcagaccttaccctttacctcattgtggctctagcgaccgtcagtctcttatccctagtcaccttcacctttctgtcagcgaagtgccttcagggaaacgcagacggggacgggggtggagggcagtgctgcaggcgccaggactcaccctccccggacttctataagcagtccagccccaacctgcaggtgagctcggacggcacgctcaagtacatggaggtgacgctgcggcccacagactcgcagagccactgctacaggacgtgcttttcaccggcctcggacggcagtgacttcacttttctaagacccctcagcgttcagcagcccacagctctggcgctggagcctgacgccatccggtcccgctctaatacgctgcgggagcggagccaggtgaggggctcggcgccgccccgggcgacccctgggggcggcactggagaagccgcccgtcctcataagggattgaacttgcatccactcctctccggccggcttggtcgctggctgcgctccacccgattctcgggatcattggaccgtttgcgcgaaaccagagtggccgattaagggatggggctccgagcaccgggggtggtggcgactgtgggcgaggggaggtgggaccgacccccacccctacactcaaaaaaggccggggcctccttcgagcttccggtgaatttcgggcgatttccgcgggtgtcgggggtcccgggaggaggcagtcacagatccacccctgcagccagcctcctaggcgccggctccggcacgcttcgccggtctgtagatttcctcttcgatttctccccagctcccagcatctgtgacttcactgttaccctccctatccccgcatcacccaaccgcacctgtctgcgggacttaggtgtgcgcgcggggctcatgcgtgtcctccctgctggccacccccacggcccacacaagttgcacgggctcgccacgccccgccaacacgtgcgcggacgcacgcacgcactcctcgcacgtgggcttacgcgaataccagctttcactgccactcgctcgcggccagattcacaggcctgttccggtccactcgcagctcccctctgccgctccctccgccgggctcaggagtactcgtagctgattgtgcgcgcctgagggtcccagatcgcggccgcccaggaccaggcgaggactccggagcctcctctcacctctcccacctgcgccccgggctgggccgggtcgcctggggggcggcctgagcgaggcgcggggccaggagcgctggagcgactgccgctctaagtgccgggcgggcaggactctacgatccttgggccagaggtccggatggtcccgggactccgtctcaagggtcggcgacccctcaacccagaagcctcgagcaggcggacaggcagagctgcccagtggccgaggcgcggcagggctccgcgttgggcgagtgagtgagcctctataggacagcaggactgggactccagtggcaccagcggccccttcctcccgcaggaagtgaaagcctcgagcgccctggctctcaacccccagagatacaggcttttggcgccgtcgtgatcacaatgtgcccagcgatctagggtcagagatttggaggtgaccaaactatctgacactctaacaagtcctgtctcctctggcagatggaaagctataggctctgccagatgccagggtgcccttatgtgtgaggaaactacaatagtaaaaaacacaagtttctccaactccaggagcttttattcaaaatatatcaatgcctaactctgctcctaggactgtattttgaaacacccccaggtgattttgatagctgattgagagaaacttactatataactcctttgagaacctcatctcatttgctcttcccaccattgctgttggctaggtactaacatgcctctcttataacagcttcacagaggtcaagtgacttgctcaagttcacagagcaagtaagagagattctaacccctgtctaactccagaatgtgtgcttttaatttcttggcacttggaactttaaaagcttgaggacaggagaggggagttgcctctgctgggattttgcttctgctgggatggggcaagggtggggttccttcccttttaggaccttacatgtggggaaagtcttctgtggctcctcatttctgagcagtccccgcagcgcaaacttggccagttatccttttggagattgagttcccccagctccgtttcctcctatcacaatcactgcatttccatgtagattctgctgtgtctaagaatacagtggctgagggctggccatccctgtgcccttctccatggcagccccagaatggtgctggtgactcccgatacacctggaatgctaggtttctgggttctgctcatatcactgccacctgtgagccttgagtgagccactggcagttccggagcttccttctccctggagtaatctgagatactcacactctctgcttctgggagcaagtatgagtattaattaccagcccaccccagaaccagtgaggaggtggctctaggagtgctccatgagagtgtgtgatgggataacacaccccctggaaagaccagaagggactcaggaatgaagtggctggccagagccccacaccttcagctaggtgggagatggctacacatcagccccttgggagccctggagacttagttggccctgcttggaggctgtgggagctggatccctccccgctgcatcccttccatttttctccgtctcagacagagcagccttgttctcttctccttagtcacagaccattgtctggcacggagttctaggggtgagaagtgtcccgggacttggatgccccgcaaaggcccaatctggcatgactcctaaattaataatgtatttagctgtgggaagagattcttgcaagccaagggcccagagaagatgtccctgtgaatgtgtcactgcacaacctggcaccaaaagggttaccaagaacagcagccatcttgctgcagaggatgctttgttcccagctgaggagttgaataaattcattctagggctggtagaattctcattgaaaagcctcctttgccactttagggggctttgtctgcacctcttcccccagttccacagaagatgccttcagtccttgaattttggctcaggagttctgactctgggggcagggaggaaggggccatttctttaggaaaggagtctcagcttgctcactgtggtcagatgaaatgtgatttatctcttggtttctggtacctcagacctctgagacctgaggtgtattttgtctttggagatgagtccacccctgccccctcttagtccgttttcttctctgtgcccactcccctccttctctcccggcccatccctaggggctcgggtgacattctaacttctcacgggtactcagcccctttccctctgttttctccacagcaagccccgcccaacacggactggcgtttctctcaggcccagagacccggcaccagcgggtaggtgactgattctccagcccaccctcttctctgcggcattttctcagggatgacgtgggaggagatgggggagggcccagcatttgctacagatggcttctccctcagtttgagatcccagggaggtcttggtgtgcggggggctggcacacagaccccggaaggaagaggcgactgccctgactgttcaggaagctcaattcacatgcttgccccttccctcctcgccacgaccggcaccttttcctatcccctgagggcactgtggaaccaaaggatggtcttaagctggtctctgggtgaaagcgaggctttctatgcccatgtactgcctaaccccctcccctgagttgagctgggctccattatgacctggggctcaggcagaaaagcatttgaccggaggaggcggtccgcactcagcgcctcctccagagcctccagagccgaggctgactgcagcctggggagagtggaggcagcacagctggaggtggaactgaggaaggactgggcggggcatggagcaggcccccttctccggcccctcctcccactgtcctctgcccctacttgtcctgctctctgtctgtggggtctccgtgtctctgcccctttttcttgagtttccgtctttgccactttctcttacctctcagtccttccctcagtctctatctcgctttgcaatctctgcctctccctctcttctccatctctgtcttagcttccgtcttgattgctgcacctcagcctcagtccctttcatttgtctacttgcattgatctgtgccgcccactgtgcctgccatggcataagtgctcaataaatgtggagtgagtaactacacgggacccttagtctctttctccttctctatctctgcctccctgtccttgtcctggacctcttttctgtttctcctttcaccgtttcctagcgccttgtgttcttctatccccagcctctatgtttctctgtctctcactatttctgctttcctctctgttctttgtctctctttgtctctgtctctgtatatctttctttgtctctgtctctggtctctgtgcctgttgtctttttctgcctctttctctgttactctttctttatctctctttttcttttatcttgtcttttttctctgagcctctgtctctgtctctcatttttttgtgcttgtgggcaagccagcacacacaaccccccacccaccacccaccaacaccccgctctcttccttccctgcccctcacacactgagcctttgatcgcagctctccaccagacaccctcccatccaagcagccccagctgctcatttcaatctggtatgaattcctgctgagacaggaaccccctgcgggctgaaggggagggaaacttcagcagaaagaccttcagttggtctgagcagagtgggataggctctgcgccaggcctcccagttagaagtcaggagcctggaggagtctcagagcccagggagagaagcaggagcttgggccaccttaccctacctcctcaatggttgagtacttgctgtccacatttgccaagttgctacagatgctgagcttccaagagttatctttcccccatcctgcaaccaaccaaacccttgttgccacaaggacccaggagcccttggtgtatggcagagattccagcttctgggcatgcacagtcctgtcacccattttaggaacgcaaagcgcttcttagaaggcccctaaaaagcagcagatcaaaaggcttgggctgcccttgcccttcctttgaccccagctgttgtccttctccctgctggccttgccaaccttctcataagttatccattaagtcattaatgtattcattcgttcatttattcaacaaatatttatcgagcatctactatgagcagggccctgtgctaaacattgggctataggagtgaacaagtagatgtgatcccagaactcataggcttccagaccagcagaggagactgaaaatttgcaacaagtaacacttaaaaaaaaaaaaaaaggctgggcactgtggttcacgcctgtaatcccagcactttgggaggccaaggtgggtagatcacttgaggtcaggggtttgagaccagcctggcagccaacatggtgaaaccccatctcgattaaaaatacaaaaattagccaggcgtggtggcaggcacctgtaatcccagcgacttaggaggctgaggcagaactgcttgaacccggaaggcagaggttgcagtgagctgagatcacgaaaaaaaaataatctagccacaaatcacagtaagttctgagaggcagagaacaatgtgagtgtaatgggggggggaagatcagagaaggcttctaggaggaggtgacattgagaagttctaggccatttatgttccctctacctaccaccaccccaggccatacactggctttgaagcagaattcaccattgaacctggaagccccaccaactgcctctcatgtgtcctctggggtgagcaccttacccctgcctcaactcccattccatcaaatgagaggcttagtggcctggaatacatgtgggagctcttggagatatggaggagaaggtgcggaacctctctctctctcctctctctgcttccttagttaacttgtggaggatgcaacaaaccttttttttttttttttttagacagagtcttgctctgttgcccaagctggagtgcagtggtgcgatcttggctcactgcaacctctgcctgccaggttcaagcgattctcctgcctcagcctcccgagtagctgggacagcaggtgtgcaccaccacacccagctcatttttgtatttttagtagagatgggtttcgccacgttggccaggctggtttcaaactccccgacctcaactgatccacctgcttcagcttcccaaagtgctagaattacaggtgtgatcgcccccggccacaacaaacatttttgattcagcggctccaaagtgaaataagcgttaggatctagtccagtaacttcaacttctctccttcattcattcaacaaatggtcagtgagcactttctgttggccaggcagtgttctcgatgtgggaggcccctgccctcaaggagtttacagtgcactgaaggagacaaatattgaccaaataattacaaaaataaatgtgagactgaaactgtcataagtgctaggtagaattgtatctggtggtgtgggcgtataatagggatttgatttagggagcaggaggacatcctggaaatgaagttgtgctgagatctgaaagacaaatacaaattaaccagctaaagaaaagaaggaagagcattccagatggtcaggcataccagcttcaaagcagggctggtgttgagttcttcagtaaacttggttcaagatcaagccagctctgggtcacactgcctacacagaaggaagagcattccaaatgggaaaagcctatgcaaaagccttgtggtgaggcctcctgggatcaagggaatggcagggagttttctctttgctggcactggagtgaggggatgaagaggagaggttccttttatccagtctaaccctggttccagccttctgttgatgccctgcctcactccctccccaccatcttgcccactgccctccagcctggtctggtcagacacaccagcttcaaagcagggctagtattgagttcttcagtaaacttggttcaagttcaagtcagcactgggtcacactgcctagacagaaggaagaagacctggccaggtgtggtggctcacgcctgtaatcccagcactttgggaggctgaggtgggtggatcacctgaggtcaggagtttgagaccagcctggccaacatgatgaaaccccatctctagtaaaaatacaaaatattagccaggtgtggtggtgcacacctgtagtcccagctactcaggaggctgaggcaggggaatcgcttgaacccaggaggcggaggttgcagtgagctgagatcacaccactgcactccagtctgggtgacagagcgagactccatcaggaaagaaagaaagaaaaagagagagagggagggagggagggaaggaaggaaggaaggaaggaaggaaggaaggaaggaaggaaggaaggaaggaagaaaagaaagaaaaagggagaaaaaatgaagaagacttacattctgaagttcctgcttggcacatgcttctcctccccaccactatcccttctcaggtcatcctttgggtgtctgatcccaatagctgttgtctcaagctctgagcccagcaaaccatttcccccttcttaggctgtaacccaggccctgccctgcagctgtccccagcctctgcacaaagagtctccatttggtccctagactgttctctgatggctccacactaccatccctcctctgagagacagtatccctgctctctctcagtttgggcagtcattcaacaaacaaatagcaacttaatttttttccacttataaaatagtacatgctcattatagaaacatgaaaaatagaaaaaaaattaaaaggaaaaccacccatcattttacaatctagggagaaccaccaccaactacagtttaatatgaaacatttcaaatatgtacaaaagtagagagaatggtgtcatgaacctgtatgataccactatccagcttcaactaatgccttatcttgtttcacctatatccctacccttatcctgtccttggattcttttgaagcaaatctcagacatcatataatttcatcttggtctccaccatctttaacagatgacttttttttttttttttttttttggagacagagtctcactctcttgcccaggctgtggcacaatctcagctcactgcagccttcgcctcccgggttcaagcaattctcatgcttcagcctcctaagtagctaggattacaggtgtgcaccaccacacacagctaatattttgtattttcagtacaaacagggtttcgccatgttggccaggctggtcttgaactcctggcctcaagtgatccaccctcctcggcctcccaaaatgttgggattacaggtgtgagccaccttgcccggccagatgattctttcataaggtccacattttatatttgagtgagtgtctcttaagtatcttaatgctcttttaatgtaaaagacttcccctccatcttccatttttgcaatttatttgttgaatccctgccttttcatatatatctttctaaacttttctttgtgtaatcaaagaacatgcatgagcttcatttttatttttatttatttatttatttatttatttatttatttatttattgatacgtagccttgctctgtcacccaggctggactgcagtggcgcaatctcggctcactgcaagctccgcctcccaggttcacgccatgctcctgcctcagcctccagaatagctgggactacaggcgcccactaccacgcccggctaattattttgtatttttagtagagacggggtttcaccgtgttagccaggatggtctcgatctcctgacctcgtgatccgcccgcctcggcctcccaaagtgctgggattacaggcgtgagccaccgcgcctggccgagcttcattttaaaaaaatctcattcacctaaataagttgttcacaaacttgtcacactttcatgtgacactttattcacatattaagaactgttattcccagtcatacggtacatttcctactagttttttaaaaatagcaactgaggccatactgtccaacagaattatagcttttttcttctttgcagtgtatcatgagaatttccccatgtctttcaaaattcttcccaagtcatttgcagagtaactcctcttatgaatatacatattattttacagaataagtcctcatatgaatatacatattatttttctaatgctaatgggcttttgctacattagaaaacatacacattcatttacaattttttttttttgagacagtctcgctctgtctccaggctggggtgcagtggcgccatctcggctcactgcaagctccacctcctgggttcaagcaattctcctgcctcagcctcctgagtagctgggactacaggcacgcgccaccacgcccagctaatttttgtatttttagtagagacggggtttcaccatgttgaccaggatggtctcaatctcttgacctcgtgatccgcctgcctcagcctccctaagtgctgggattacaggtgggagccaccatccccagcctcatttacattttaacacaattaaattcagggtgttgtcagggtgacttcctagatttctcagttttttgagcatgatgtagggagtattttattatagtccagtctatgggatattcccttatacacacacacacacacacacacacacacacacacacacacacaccccaaactcaatagggcaagaaccatattcatcatctcttaaatcctaggtcctgtcacaggccactgcttggaaaatagttgactaaatgtagtccatttcttccatttttacttttcactattccccaaatcctggaagagtccctcatatctgctgctggggctccaaggcctccaagctgaagcccagtacgttgttgtgcataagatcataggccctggaatcatattaggctggctttcaggttgcaactctaccagttccagctgtgtgactctggtatagtctctcaacctctctgagccctgttttcatctgttggaaaatatagataatcacaacacttatctgcagggtgattccgaggataaaaaagacaaatatattacccagtcagcttagaataggaagctctcagtaaatggttaaaaaagaggtctctctccctctgctcatctcttacccagcttcacataattggcagcccacccacctgtttggccctcaaccttcaaccatttcccaggacgcctccttacactcctgatcatcatggttccaaccccactgttccactcagctttgttccctcaacaccactgctccctgtgacaggtcatcctcctaacctctggcatctggtcccgttgtctccctgacaacccgcatgctctcctccctgcaacccccgccgcttgcctgctctccctactttattcccattagcccccttcacctggggctgagaacacctggccttgaccctgcaccctcagccaggcccacagagctcagtcgggccggaagtaaggaccccagatattcagttgaggaatttaacattaatacaataatatagaatccaccagcagattttcataaatgttctgtgtgttcttttatccttttttttaatccaggattttatcaaggagcatagattgcatttggttgtcacgtctttcctctcctttaatctggagccagctcccagtctttttatttttttaatgacatggatatttttaaagagtccaggccagttgtactttaaaatgtccccgaacctggatttgctggctattctctgatggttagattcagattacacaccttggtaggaatacttcccgcagcatcacactgggactcatctaacgtcggcctgtcccactatcagtgatgccgagtttgttcgtgtggtaaaaacagtgtcccagatctctccattataaaaatatatttttataaagatattttaaaatatttgtgaaaatataagtaatctgtggatgatactttgagataggcagcaacccttcatgcaattttagtattccctgatgatccttgcctgtatctgtttttacatcagtgattacaaagcggtgatgttctgtcattccttctacatgtatttgctggtattcttctgaaaattacctggatgatttcttcagatttaaattcactgtcttttccttggggaagcctggactggctgagctgcctaaccctgactctctgtcttttttttttttttgacagggagtctagctctgttgccaggctggagtgcagtggcaaccttcacctcctgggttcaagcgattctcctgcctcagcctcccaagtagctgggattacaggcgtgtgccaccatgcccggttaattttttttttttaatatctattttagttgagacagggtttcaccatgttggtcagaatggtctcgatctcctgacctcgtggtctgcccgcccctgcctctcttcataccctctggtagcccctgacacagcccatggcaagtatcacaattgcaattactctattgtgtaattatttaaaatcagcctctcagtgcccaccatgagcaccgtaaagatggacagtttctatcatactcacagccacaaccccagcacctggctctgtgtctggtacatagaaattgctcaagaaagaattgttggaggggcgcggtggctcacgcctgtaattccagcactttgggaagcggaggcaggtggatcatgaggtcaggagttcgaaaccaacctggccaatatggtgaaaccccatctctactaaaaatacaaaaattcgctgggcatggtggcatgtgtgcacttgtcgtcccagctgctcaagaggctgaggcaggagaatcacttgaacctgggaggcagaggttgcagtgagccgagatcgcgccactgtactccagcctgggtgacagagcgagactccagctcaaaaaaaaaaaaaaaagaaaaaagaaaagaaataattattgaatcaatggaaacagaattacaactcttcccacttttgggaaggagaattgagattcctgctttccccttcaaccctagctttatgtttgttgtgatggtatagaggtcacacatggcagccttgtgtctgttcttaggctgagttcatctacttagggacggggaatcccagattgggcaaaaccaaaagcagggacagaccttggaaaaattgtaaagcagttcttggttgtgctcacccaccatgacaaaatatgcacacacacaacgcaacacacacacagacattttcatgccttcaaggcctaccctacagcctttcccatggtgccaaacccttcttcttaccttacagtcacttaactgtctctgctggtctcttcccactcatttaggcaacaaatatttattgaaaaacttctctgagccagatggtgccaaacagttacctaaagggcagactgtgtgtgtgccagggctgtttcccgccaacactcccctgcaaattgaaataatttcatccttggaaattcaaaaaaatcatgaaaattgtcactgtgggaaaattccaagtagagctgaaccttctaagaagcagagagttcttcttatggtttagtatttttttaaattatgaatcatttcatgttttttcaacactcggagtttctaaaagtctcacttaggtccaagtgctaggctttgtgctaggtgcttcagtaggaagcaggtggagtcgctgcctcacagaagccagtgtggtggaggaacagacaggcactacaacagctgcagtgtgactagtgccatgtggggcagccgctgggatgggagtacagtggaggcacctgcccagtctgagtggatctcctctgatatattttattcgtgtcatcatggcaaatgttgggggactggcattctagggaacaccatctgcccaggattcacagcaagagggaacttgagggataggaaagtgcaccttggaaaaggtttgatgatagagtgtttgagggcggggggtgggggttcttgtaaaataggaggggcaggttcttctatggccgtggattttactctgagggcttaggaagccattgaattttagaaatttcttctccctgctccagggtctcttggggcctcctacatctccccctaggtacctcctaggtccccactttttctctagctctggaacattctcttccatttcccaccttcacagtcctctggagaaggtctgatctccctcactatgacaggaagccaggctctctcatggtgggtgggggaatgcactatgttcaatgcattggaccagcctggccaacatggtgaaaccccgtctgtactaaaaatacaaaaattagcctggcacagtggcaggtgcctgtcatcccagctacttgggagactgaggcaggagaatcgcttgaacccaggaggtggatgttgcaatgagccaagatcgcgccactgcactccagcctggatgacagagtaagaccctgtctaaaacaaaaagaaaaaagcatcggaggcagcaaagagctggtttgagggactgacttgtgggattctggcttctgaaggattgtagaagtgcctcctaccttgctgagagaaacaggtcttgggcatggggtagggttagggtactaggtttgggagccctgggagaggacaggaggggcatgagctgtgccggcctgggagtctgtgctcaccatcctactctctccccagctcccaaaatggcgatgacaccggcacctggcccaacaaccagtttgacacagagatgctgcaagccatgatcttggcgtccgccagtggtaagtggtgtcagtgtgtgtatggaagagtgggagacctggggttctggggtgcatctcacagccaccatgcccacggactggatgtcaaacctgtgtagtttctccagatctttcggcaggtctgaaaggacccacaattccaaacataaagcctggaattgtggctaaggaacagcagaggggttgggggtcctgggatgcctggaggagagcgaacaaggaaaagactcatggagggaatagtggttacaagtctagctctggaatgggacagtgtagctcaggtcctagctctgctactatccttgggacttggatcgacttgctcaatctctctaaacctcagtttcctcagcctagaaagtggggacagggaccccaaagggttgttgtagagattaaatgagatgataccacaaagcatagagttctgggcctggcgcttggaagccctcaagcaatgaaagtgggtgtagaaatccccagccgagagaacacctcctctttatgcgaggctcctcttttgctgcccctaactccagagtaggattctggttttcccataaggttgactaagggcttcctttgtaatagagattcggctagtggtggttgtccctgaagagtcactagggcccagagcaggagaagaagaatatcatttgtccttaagagcacagcctaagctgggcgtggtggctcacgcctgtaatcccagcactttgggaagctgaggcaggaggatcatgaggtcaggagttcgaaaccggcctggccaacatagtgaaaccctgtctctactaaaaatacaaaaattagctgggcatggtggtgcgtgcctgtagtcccagctacttgggaggctgaggcaggagaatcgcttgaacctgggaggtggctgtggtgagcagaaaatcgcaccactgcactccagcctgggcaacagtctcgctctgtctcaaaaaaaaaaaaaaaaaaaaagagcacaggctttagaggcaggccaatctggattcaaatcctggcacctggcaccaccacttagcaatgagtccttaggtaagttattaaaccccctcggtttcacttactattaatgggcacagtattaacggatctcattgtggtgttaccagggccaaatgcaagtccctcagcacaggattggcagagagtaagggcacaatatattattatctttgctgacccaaacccgttttttactgggtagaaagcagaattagaataatgcctattaataaagactagcttctggagcagcaaatcctgggcttataaggaggctggcagaggatcaaggcattgccctatatcatgaactgatagccctgccctccagcatgtctggaggactggtgggtagagaaccaggtgaaatcacaagaagcactgtcatcacacctgggcacatactaaacaaactttaggggcctcctgtcaatgaatcctctcaatagctctgcaaggcaggtctgatttctcacactcgacagatgagagaaccgagaaggcacttgccccagggtcctcagttttgagctgccaagctgaggttctaacctggctcaactcctaagtttatgctctttctactatagggaccatggctgcctttggatccagcctcggcttctctattacctgagcaggatgagaggctgtcctcttcctcgagctctgctttattcttccagatcagggttgccagataaaatacaggatgcccagttacagttgaatgtcagataaacagcaagtactatttcagcataagtcagtctcaaatgttgcatgagacataatgtactaaaaaaaaaaatgctcattgtttacctgaaattcaaatttaactgggagccctgtacttttatttactaaatctggcaactctaccccagatgtctgtgaggttaagtggggccaggcctacagctgacggaaggacagagagagaggtggcagggactgctggcctcctgaggcagagctgtcccaggtctggtggggctatgattccagagaggccagagactgagtatgaaagtggcaggcggctgggtctgaggagatgccaagttggcctcttgagggaaataaacaggtatatttagctgttgtggccttgcgccctgaggccaggaagcagctttttagcctaaatccagatgttaaaaacagaaatgaaatcagtatttatggccccaaaccctccaagcaagtcatgcagctcgttcccctgtcaaggcctcccacctttggcccacacagggcctgaccctcgtctaagcctgcgccctggggaacggaccctgggggtggaggtggtgggtcaggccctgctctcactttcacacccgcttcctagccctgaaaccagagaggttcctgaagtccagcccagccaggcctgtggggctgctgagaggggttaagtaagagggagagtaaaaaccgacacttgggaggaggcttttaaaataaacatctgcggggagggatgctctcaaggaggctgcggtttgcagctcagccagctgtgttccagctaatcagcctccttgggctactctggagttgctgccttggccctgggatggggtaggttaagaggacagagggaggtcagggagctgggggctgagtttccctgagtagaggctggcacaggagagaaggcatcacccccacctcgtccaggccagaagatgtccagcttcttgaggctctcctaagtctgcctctcctgggaccaagagaaaatcccggtccttgaccaaggtgggccttggggggagtggggtgtagagggaggggcactggagaactgactctacagaaagtcaaagctggcaatccaacttcttcccctcagatttatagatgggaaaacaggcttgagccacgcagagacttgaccaagctcacacagttccttagtggcagagcagagcaaatattctctttcttttacattctggatttccatatcttctctccctcctggtccagcccaacctcagggcaccccccacgaggtgggcgggggatggctttgtcacttgcacccactcggggtgctactcagagatcttgggtgcacataggacgtgggtgggccgagcttctagctactccgtcaggcccttcctgtcattctgtctctgcctcccttctccctgcttctccgtgttcctcctcattcttttctgtgtgcagggagactacaccccccaccccgctctttctctggcgcctctgaggtcccccctctagcccctaaatcactctggaatcctggctctttgaagccagatctgggcccccctcccctaccccttccattcccaggctgggaaaggctgaagaggctgacggctggaggggagggggcggggcggtggcggatctggcttccttttggagttaattagggaaaacagagaaatgtcagcggaatgaaagggctgggggtgggggccagctggggtaggagaggaggaagtgggcagctgctccctcccactcaacccctctcccccgcccccagaaagctctcagctccggggatttgcgacatgaaatgggggctgtagaaacctgagcgctggtgcgtgaagagaaaaaccgaggcgcatcccggctctcccctcccgtgtgccctcctcctcttatgccggcttgaaaatatttcctgtctctctatttctcaatccctggttgatgtcccaggattactcagcctctccggctttagtcactctcgctacccgctcccagggtccagggtggaggcagagggaggctgggagagaagctctactgccagctgggcctgggctggcctgggcatccctgaggttttaactgtctcctaaccacagaggatctcagggcctccagcagcgagccccaatgagtcaaactcttgtttcctcctctcccacccccgacccagtcagggcaggtgaggggtagaggtgatggcatgctggatgtgacggtgttgatgatgtattgcacaggatgaagcaccatctcatttagtcctcacagcagccttcacagtgcgtacaaatcagctggcaattccgagaggctgcattctaaacaagttcctgggtgatgctgagccagggccagagtgtggacttctctgggccccagtttcttcttctgtacagtgggacgttggactggaggtgctgtctgatgtcacctagctgtggcactctgagcctgtgcctaaagtgtccctgagatgtctagtccccgagatcatcatctcctcagcttcatagagccgagctcttctccatcttctctctacctcccattcactcagaacagggataaggtccaagctgctggtggtgatggtgactgactgtcccttccagcatgcgcttaggtacacttgggcctgaatgcccctctaacaaatgctaccgggtatggccttggtccttctaacacttggttccctcatctgtaaaatgagggtcataccacatagctggctgggctgttatgtagaggttaaaagtgattgtgcatgtgaagcatccagcagagtgcctggcacacagtaggtgctcaaatgctgttttgaaatacaaaaattagctgggctagtggtgtgcacctgtaatctcagctactcaggaggttgaggcaggagaatcacttgagcccaggaggcagaggttgcagtgagccgggatcgcgccactgcactccaggctgggcgacagagcaggactccatcttaaaaaaaaaaaaaaaaaaatgctgttttgaaatggaggcttggaagagcactcttcacccccaccccacacacttactaacggaactaccgaatctctactcgtgccaggccttgcttggcaaaggctaggggcatgtaaagccatggtttcatggctgctgccctccaggagcccatggtctagtgtgggagtcagaggctcccttgagaaagccagggcaaggaactgagagcccgtgtcacagccctgagagaaataccagcgaatgtgttttgagcacttacatctaccaggcactattttacgtacctgacatacattttcttatttagcattcactaaaaccagaagaggtggttaccattatcatccccattttgcagatgagaaaactgaagtggcataaggaggttaggtagacttgcccaggatcacagtgagtaaggaaaggagctaggaatcaaacctagactttctcactccagagcctcttaacctctaccctcaactcttgtgaagagagactaccttggtgacccctatattcccagtgctcagcgtggtcaaggcccagggtgctgtataggcattcattaactgctggggatataagacagtgactgttgaggaccctaagtttagctcccacctgatcttcctctgtctctgcagaagctgctgatgggagctccaccctgggagggggtgccggcaccatgggattgagcgcccgctacggaccccagttcaccctgcagcacgtgcccgactaccgccagaatgtctacatcccaggcagcaatgccacactgaccaacgcagctggcaagcgggatggcaaggccccagcaggtggcaatggcaacaagaagaagtcgggcaagaaggagaagaagtaacatggaggccaggccaagagccacagggcggcctctccccaaccagcccagcttctccttacctgcacccaggcctcagagtttcagggctaacccccagaatactggtaggggccaaggccatgctccccttgggaaacagaaacaagtgcccagtcagcacctaccccttcccccccagggggttgaatatgcaaaagcagttccgctgggaacccccatccaatcaactgctgtacccatgggggtagtggggttactgtagacaccaagaaccatttgccacaccccgtttagttacagctgaactcctccatcttccaaatcaatcaggcccatccatcccatgcctccctcctccccaccccactccaacagttcctctttcccgagtaaggtggttggggtgttgaagtaccaagtaacctacaagcctcctagttctgaaaagttggaagggcatcatgacctcttggcctctcctttgattctcaatcttcccccaaagcatggtttggtgccagccccttcacctccttccagagcccaagatcaatgctcaagttttggaggacatgatcaccatccccatggtactgatgcttgctggatttagggagggcattttgctaccaagcctcttcccaacgccctggggaccagtcttctgttttgtttttcattgtttgacgtttccactgcatgccttgacttcccccacctcctcctcaaacaagagactccactgcatgttccaagacagtatggggtggtaagataaggaagggaagtgtgtggatgtggatggtgggggcatggacaaagcttgacacatcaagttatcaaggccttggaggaggctctgtatgtcctcaggggactgacaacatcctccagattccagccataaaccaataactaggctggacccttcccactacataatagggctcagcccaggcagccagctttgggctgagctaacaggaccaatggattaaactggcatttcagtccaaggaagctcgaagcaggtttaggaccaggtccccttgagaggtcagaggggcctctgtgggtgctgggtactccagaggtgccactggtggaagggtcagcggagccccagcaggaagggtgggccagccaggccattcttagtccctgggttggggaggcagggagctagggcagggaccaaatgaacagaaagtctcagcccaggatggggcttcttcaacagggcccctgccctcctgaagcctcagtccttcaccttgccaggtgccgtttctcttccgtgaaggccactgcccaggtccccagtgcgccccctagtggccatagcctggttaaagttccccagtgcctccttgtgcatagaccttcttctcccacccccttctgcccctgggtccccggccatccagcggggctgccagagaaccccagacctgcccttacagtagtgtagcgccccctccctctttcggctggtgtagaatagccagtagtgtagtgcggtgtgcttttacgtgatggcgggtgggcagcgggcggcgggctccgcgcagccgtctgtccttgatctgcccgcggcggcccgtgttgtgttttgtgctgtgtccacgcgctaaggcgaccccctcccccgtactgacttctcctataagcgcttctcttcgcatagtcacgtagctcccaccccaccctcttcctgtgtctcacgcaagttttatactctaatatttatatggctttttttcttcgacaaaaaaataataaaacgtttcttctgaaaagctgaacgtttctgtataagcgatggaagctcctggcatgtgtgcatgaagtgatgagctgaggtgggtgctggaagaagggcggaatcgggaggccactttgtgtcattgcgcgtctagatgtttccgaattgcgtgtgtgtgtgtgactgtgcaatatggttgtgtatgcttgcaatgccgttgtgcctatgagacagtgtgcgattgtgtgcctatggatctgtgtaccgtgtgccattgtgtgatcggtccgctgtgggggtggggatctgagtgcggcgtgtcagtgtgcagtggagtgtgcagtctaagcttgcggctgtctccaggcagaagaggagaccccggcgcgggcgggggcgggttggcgccgggcaaacgccttgggtagaggggagaggacgtttcgttagttcccgccccttcctgactaaaattgcctacccgaagcgccccggagggcttcacgggaggagggtagactctcctttgcccccgcacccccacccccgctgcctaggggttttgggaaagccgcgggagtgggagggaatgcgggaggtgattcttccaaagccaagtctgcagctcgagcctcagtttccccatctggaattcgccttcccgctgacatctccgtagcgaagcctaagaaattggagggctcatcctcttcttgcgggggtcaaggggactgaaaggacgtgcaggaaatgagatccatcgcagactcagctcccctccctccttcctgtcggtgcttttccactcactcgcctgctctcccatctccccgccccctccgcctgcctcctcgaagcactgtgggattccgaggttgctgcagccagagaagctgcagaaaaacacggagctgggggtgaagggggacttaaaaggggaactacccggaaggacccaagaacacaaagacagagccactgcggttatctggctggtcagcaagggtatgcggcttcctccgcgctgcggaggctcccagagccaggtcacccattctgccagctcaagtctgttgtcatgggaaccaaaccttccaacttaagaatctgggggcgactttctagcgtgggaggaagggtggtgtgcacggttgctgagatggaagcagggttttgttactcagagccaggctgcggaggggcggggtgccgggcgcctgggttctattccaggcacagcagcagactggcagagcgcgtgagcagctgtggtttgtcccctaattggtatgtgtgcctataaagctctgaaccagaaaggcgtggcctccggggggacgggagggaggcggcaggcaacccatccccacacctcaggccatactgaggaggcagctgcccaggctccagggctatttaaaaggcttttatttccagttccagagcccgcccgaatgggtttgtggtcctctccaggcctctccctgtctatcctgggcctgctcattgctggtctggcttttttgtgcaggtcataacg

SEQ ID NO: 450 - DNA, 113028 bp, Homo sapiens
  source 1..113028: mol_type = genomic DNA
aataattttctaagtttatccaggttttcttggatgcaaaatccttttccacctctatataattaccagaagaaacttacaaaaaaaaggaaatgctattgcctgaatttctcttgctcggaatcctgacatattcttgaagaaggggaaaaagacaccggatttgtcttatcgtttggagctttaaatataaatgactggatgttttctcaacatccttgtaggatggaaggtgaatacaggattattccatttttaagacaaaaactactagtcttgtgtacatacaaagctcccattacatggtataagtcttttgcttggtttcccttagtatgtgattcagtaaatgggttccttacaaagtgctgagatttcttataataccacttacttttaacctttcagtagttttctttgttgtatattttgtgttctttttcccaaattattatataagtttaagtgatgcttagaataatgtttaagaccactttaaaattgcataatttattgatgaaggattaaaatagaaacttgcttttcagtgtatatgcatttgaatcattgaaacacagtctgtgcatgcattacatattcacattaaaaaactaagcatttttgaaatagcagaaaagtttaagcaattacaaaaatgtgaaaatttccaactttaatcctgttaatatttagcaatattaggcgagaacatctgtaactattgctgaattaatattacttttataatacaaaaatttaaaataaacgtttttccaggaattttatcatcaaaataaaccccagaaaataatttcaaagtggataatctatccttatatatgtattaatacaattatatattttacatttacaaatatataggtataaaaattaaaaatgaatgtacttccaaacaagattgcacataaaaattacttcagaaaattgttaagatacacagaaaaaattgaagcatcataaaaaggaaattataatagtttacatatctagaaatagagtgcaaagttctaccaagaataagaataaattaatattaagcaatggtttgtgattttataatacacttacagaaattttattccactttatttacaactcagatatctaaaaaatagattgcttttgaaatacaaatgcaagaaacaattggagaaatctaaaatcataattagaagagagtagtgttttctttatcagccatctgatataatgttacacatcagtgggtgtagtaacggcttaggactctgagcgccgctgttgatcaactctaagcgaaaatcaggactccatccggatttccagttctgcggctacacaaaacccggcagataccacaaacctgctcccaggctgcagcaaaactcagcctctttcttctaaggaaaagatcaccatactttgcagggtggaagaaagaacctgatgaagcagcgcgcacagagatccttttgagaaaattccaaagcgaggcagcaatggcagctccaaccaaatgccagctccgcggaagattagtcctgctatgctcgctcctggggatgctatgggaggccagggccagtcagattcgctactcagtgcctgaagagacagaaaagggctatattgtgggcaacatctccaaggacctggctctggagccccgggagctggcggagcgccgagtccgcatcgtctctagaggtaggacgcagcttttctctctgaacccgcgcagcggcaccttggtcaccgcgggtaggatagaccgggaggagctctgtgctcagagcccgcggtgtctggtgaactttaaagtcctggttgaagacagagtgaaactgtacggaatagaaatagaagtaactgatattaacgacagcgccccaaagttccaggccgaaagtctggaagtaaaaattaacgaaatcgcggttcctggagcacgttatccacttccagaagctattgatccggatgttggcgtgaactccctccagagctaccagctcagccccaatcaccacttctccctgaacgtgcagactggagacaatggagccataaacccagagctggtgctggagcgcgccctggacagggaggaggcaactgcccaccacctggtcctcacggcctcggatggcggcgagccgcgtcgctccagcacagtgcgcatccatgtgacagtgttggatacaaatgataatgccccggtttttgctcaacggatttaccgagttaaagtccttgagaacgtgcccccaggcacctggctgcttactgcaacagccagcgacctggatgagggaatcaacggaaaagtggcatacaaattctggaaaattaatgaaaaacaatctctgctattccagcttaatgaaaatactggggaaatatcaacagcaaaaagtctagattatgaagaatgttcattttatgaaatggaaatacaagctgaagatggtgggggattgaaagggtggacaaaagtgctcatttcggtggaagatgtaaatgacaatagacctgaagtgaccattacatctctgtttagcccagtgagagaagacgcacctcagggaacagtaattcttcttttcaatgctcatgaccgagactccgggaagaatggtcaagttgtctgttctatccaggagaatctatcttttacattagaaaattcagaagaagattattacagattgttgacggcccaaattcttgaccgagaaaaagcctcagaatataatatcacggtgactgcaacagacagaggaactccgcccctgtccacagaaattcacatcaccctgcaagtgactgacatcaatgataatccacctgctttctctcaagcctcctactcagtctacctcccggaaaacaacgccagaggtacttccatcttctccgtgattgcctatgaccctgatagcaatgagaattctagagttatttactccttggcagaggataccatccaagggtctcctctctccacctatgtctctattaactcagacactggtgtgctgtatgctctgtgctcctttgactatgagcagtttagagatttgcaaatgcaggtgacggcaagtgacagtggaagcccaccacttagcagcaatgtgtcattgagactgtttgttttggaccagaatgacaatgccccagaaatcctgtaccctgccctccccactgatggttctactggtgtggagctggcaccccgctctgcagagcctggctacctggtgaccaaggtggtggcagtggacagagactcaggccagaatgcttggctctcctaccgcctattcaaggccagtgagccagggctcttctcggtggggctgcacacaggtgaagtgcgcacagctcgggccctgctagatagagatgcgctcaaacagagccttgtggtggctgtacaggaccatggccagccccctctctcggccactgtcacgctcacagtagccatagctgacagcatcccagacatcctggctgacctgggcagtcttcagatccctgcagacctggaggcctcagaccttaccctctacctcgttgtggctgtggcagtcgtctcctgtgtcttcctcaccttcgttatcacgctgctggccctcaggctgaggcactggcactcctcgcatctgctgcgggctaccagtgatgggttggctggtgtgcccacctcacactttgtgggtgtagatggggttcgagctttcctacagacctattctcaggagttctccctcaccgctgactcaaggaagagtcacctgatcttcccccagcccaactatgcagacacactcatcagccagcagagctgtgagaaaaatgagcctttgtgcgtctctgttgattccaagtttcctatagaagacacccctttggttccggtgagttcattttttttctttctttcttttctttttttgttttttgttttgttttgtttttgagacagagtcttactctgttacccaggctggaatgcagtggtgtgatctcggctcattgcaacctccgcctcccaaattcaagcgattctcctgcctcagcctcccaagtagagtagctgggactagagtagagtagctgggactacaggcctcccaagtagaataactgggactacaggcacgtgccaccacgcccggctaattttttgtgtgtttttagtagagacggggtgtcaccatgttggccaggctggtcttgaattcctaacctcaagtgatccacccacctcagcctcccaaagcactgggattacaggcgtgagccactgcgcctggcccttaactttctattatagttagctttctctttaactgtctgtacttaaggtagtataagttgatatcagtgtgtttctcatcacttttcactgggcctaattgttgctccaacactgaaaggaggcatttattagttatatttgctgatataactttcatgttctcataataattaacctgctgtcaacgtaaaccatacttcatggggtagctctcagcctgcattgatgtgggctttttgggtagggttgcttcattggttgcagtggactcatatcataaaattcttactcctttttttttttttttaagagatgggggtgtcattctgttgtccagggtggaatgcagtggtgtgggtaaagcttactgcagtctcaatctcctgggcttatgcaatcctcccacctcagccttcacagtagctaggactgaggtgggagggctagcaagctatgttgcccagactggtctcaaacgatcttcctgcttcagtttcccaaagcactgggtgaggtgtgaaccacctcacccagcaaattcttactcctacgatcatttattcaggtcatactatgtttgtaagggtaaactgataaaaaggtaaatgtattcttcttagagaaacagctgaaagcccagatttattgcttctattcttccatttctatgacaggaaaacacctctttgaggttatatttttcagatcacaagtgtgtaaagtctgtttgtgtttacagatattttctgacgaagattcaaacttcagttatccacttccaaaccctagtaaaccaattttttccctttaatggtgaaagttgtcacatcttttattctcatatcttcaaaggtcttaatttcctaatgctttaatgttaaattatggagaatagtaggacattcttcttttctatagtatatgcttgctcaagagaagtttctaagactggacactgtgaaatgacaaaacaaggaattaaaaatatttctctcacttatatattatttctggctcaattctccaacttttgagtctagaaatgaacttgcatatcagatataatttaagaaaatattctcaggaactgctgggaagattctaaaactattttactgtttttagctataaggaagagaataatgtattatttaatgttattttaaacatagtgttgtttcaaatagtaaataacatttcacaagacatttgaaaataagctttgaagttgactcaaaattctatgctaaacatgtgatccatagatacactgatgactgctggcatttctgtggaaatgaagaattgttttatttgtttgtaattatttgggtttcagttgctttatttttaagaaaaaaaagctgaagtgtctgggaatcctttatgacatacagacattttaattatttcaaacacgttttcccccttaagtgggtagcaaaaaaaataaagcatacttcaggctcatatttttaaccatgcaacaagaaaattgttacaatttctgttctgaggagtagccttcatacttagtatttataaatattgaaatgtatgttaatttggggaaaacataacagatatccatgaaggcttgtatgtcatggtaggtagttactattcgataccacaaaaatgtctcttgcccttaaaaccagaacacgaggctcaccagacagatgactgaatggagtatggaaaatctttatttctgtttttcttaggctatgtaggacttaacttattgtgcattggtaacagattgtagaacataagctgaaagataaaattcttgaccttaatgtctcatcttaaaaagaagcattggttgacattctatatctcgtattacttaaaaataatgggggagcgcagtatatattaaacaaagattggctttgtggtgatcattgttgaaggtggggtgatggctatgtgaaggttcactatatatactccctactgttgtataagtttgaaattgtgcataatagatttatttaaaacacaaagcatagaaatatctactataatattatggtgagagcaaaatttgagggggatgtacacctgcattttcgaagaatatatacatttcggagaccgaattcaaaatgaaaaaccgggctgctgtcccgcacggagcctctgggcgccgctgtcggccagtgcagagcaagcgctgacgccggggatccgtcagcctctggcctgggattccctgcgcagccaacaacagaaagaagaaaaccagctcccacacagagcctcccggctgcgcagacctttcccagcacagcggattgccagctccgagacccgggactcctcctgtcctgggccgaatgctcttttagcgcggtagagtgcactttctccaactggaaaagcggggacccagcgagaacccgagcgaacgatgggagggagctgcgcgcagaggcgccgggccggcccgcggcaggtgctatttcctttgctgctgcctttgttctaccccaccctgagtgagccgatccgctactcgattccggaggagctggccaagggctcggtggtggggaacctcgctaaggatctagggctcagtgtcctggatgtgtcggctcgcaagctgcgagtgagcgcggagaagctgcacttcagcgtagacgcggagagcggggacttacttgtgaagaaccgaatagaccgtgagcaaatatgcaaagagagaagaagatgtgagttgcaattggaagctgtggtggaaaatcctttaaatatttttcatgtcattgtggtgattgaggatgttaatgaccacgcccctcaatttgataaaaaggaaatacatttagaaattttcgaatctgcatccgctggtacacgactatcgcttgaccctgccacggatcctgatataaacataaactcaattaaagattataagataaactctaatccttatttttcattaatggttagagttaattccgatggtggcaaatacccagagttatctctggagaaactcctagaccgggaagaacagagatctcatagcttgatattgactgccttggacggaggggacccaccaagaagtgccaccgctcacatagaaatttctgtcaaggataccaatgataaccccccggttttcagcagagacgaatatagaattagtcttagtgaaaatctgccccctgggtcccctgtgttgcaagtgacagccactgaccaggatgagggggtcaatgctgagataaactactacttccgaagcactgcccagagcacaaaacatatgttctcattggatgagaaaacaggtatgattaagaataaccagtcatttgattttgaagatgtagaaaggtacaccatggaagtggaagcgaaggacggaggtggtctctctacccagtgtaaagtaatcatagaaatccttgatgaaaacgacaacagcccagaaataatcatcacttctctctctgatcagattttggagaattcacctccaggaatggttgttgccctcttcaaaacacgggatctggatttcggaggaaatggagaagtcaggtgtaatatagaaacagacattccattcaagatttattcttcttccaataactactacaaactggtgacagatggagccctggaccgagagcagacaccagaatacaatgtcaccatcgtagccactgacaggggcaagccgcctctttcttccagtagaagcatcaccttgtatgtcgctgacatcaacgacaacgccccagttttcgaccagacgtcctacgtggtccacgtggccgagaacaacccgccaggagcctccattgcgcaagtgagcgcctctgacccggatttggggctcaatggccacatctcctactctatagtggcgagtgacctagagcccctggcggtgtcgtcatacgtgtcagtgagcgcgcagagcggggtggtgttcgcgcagcgcgcctttgatcacgagcagctgcgcgccttcgcgctcacgctgcaggcccgcgaccacggctcgcccacgctcagcgccaacgtgagcctgcgcgtgttggtgggagaccgcaatgacaacgcaccgcgggtgctgtacccagctctgggtcctgacggctccgcgttcttcgatatggtacctcgctctgcagagcccggctacctagtgactaaggtggtagcggtggacgccgactcgggacacaacgcctggctgtcctaccacgtgctgcaggccagtgagcccggactcttcagcctggggctgcgcactggggaggtgcgcacggctcgagccttaggcgacagggacgcagcccgccagcgcctgctggtcgctgtgcgtgacggtggacagccgccactctctgccaccgccacgcttcatctggtcttcgcagacaacttgcaagagatactgccagacctcagcgaccgccctgtactctctgacccccaggctgaactgcagttttacctggtggtggccttggccttaatctcagtgctcttcctcctcgccgtgattctggccattgccttgcgcctgcgacgctctctcagccctgctacttgggactgcttccatcctggtctctgtgtcaagtctggacctgtagttccccccaactacagtgaggggactttgccttattcttataatctgtgcattgcacatacgggtacaaaagagtttaatttcctaaaatgcagtgtgcccctacattccaatgaagacatggtttgcagtgtttctcctggagccttaattccacctcatggtggggaggatttgacttcacatcctgagactctgacttcggtgagtttctcttttttgtgtgtgatttatctaatagtctactagtttctcatattttaggcatactactttattttcatatctagaatcatatgtttaaaatccatagctttttacaatattttctcaatgttttttcaattatagttttcactatgtatttggttcataagttgctctatctttttgtaaaataatgtcaccagactgaagatattttgtctttgtcttttttttttttttttttttttgagatggagtctcgcactgttgcctaggctggagtgcagtggcgtgatctctgctcactgcaacctccgccttctgggttcaagcgattctcctgcctcagcctcccaagtagctgggattactggtgcccctcaccacagctaaattttttgtatttttagtagacatggggtttcactatgtcgaccaggctgttcagaaactcctgtcctcgtgatcctcccaccttggcctctcaaagtgctgggattacaggcgtgagccacaatattttgtcaagttctgactatcgaacagaagcagtggtcttggcatctaagaaaacaaacaagtaacctatctattcaaatttgcgaagacttagtgaatttacgatatcttatttatatatttttaaagcctaaaaatattcagaagacaggcccagtggctcacacctataatcacagcactttgataggctgaatcggaaagtatcacttgagcccaagaattgagaccagcctgggcaatatagggagaccccccatctctactaaaacaacaacaacaaaaaaaaacattagcagagtgtggtagcattcccctgtggtcccagctacttgggaggctgagctgggtggattgcttggtcctgggaggtcaaggttgcagtgagccctgatcttgccactgcactccagcctgggcgacagagtgcgaccctgtctctaaaataaataaataaatatgcaggcagggccaagtgtgctgtaatcccagcactttgggaggtggaggtggagaatctcttgagcgcaggaatttgagaccagcctgggcaacacagggagactccatcgctacagaacatttaaaaattagcagggtgtggtggcacatgcctgtggtctcagctactctggtggctgtggtgggagaatcgcttgagcccaggaagtctaggctgcagtgagctgtctaggtgacagagtgagaccctgtctcaaaaaaaaaagacatttctaagaaataaatgaaatactattgcctttgcactcagtctctgtctctgattctctgatagaagatttttgaagaaaaaagataaaatctttgaagagttctatacttggaaggcatagtgacataaacacttctgaacatcctgttctctgtgtgaaagaagtgaacttctataccctttgcatttgagggaacaattgctactgggttgatgggcacacacagttgaagatatgtgaaccactggactttggcctctgatacaaactgcctaagagaagagattatttatactggtattaatgctctgatgaaaacaggtcatttgacataaacacttacttgttaaaaacctatatcactacatctaactttgttttctaaaacttttagtacttcaaattctacgtatttcttttctcattacaatgcaaacagtttaatttgcaactgtaatatatgttcattttagtttgtgattacctgcttaatcatttaaataggtccatttaacttgtatccctgtaagataaagtatgttttacacaaaaaggttaattaaggctcagtaaaactattctagaagagtactttaaaaacctcttacacaatcctaagctaaataagtttaatgaattaagtagttacaattataaagcttcagagtgaattatctcatgagtttatttaatataatctttgtatgaatgtatactaaataaaattggcctattcaaatcacaattttaaattataagacttttctgaatttacctagacactaatatgacctaaaataagtattatttaccttttattaaagtgtgtacatttctgttgggaaaacgtgttgcaaatatatatttaaccaaacattatcttgaaatatttacaatattttcactccactttatcacacctcccctaagaaacctacatatagtaaattatttaaagataggagtggagaaaccaaagaatctatgtaaaatataataatccaacagaatagtttactttccattgcatgtatcacttgggtgcagtaacttcttaggactctgagcgccgctgttcacctactaggagagaaaacgcagccagagctcaatccggattctcagggcttcaactacacaagccccacaaaccggctgctgggctgcagggaagctcactccagaatttaaagtgcccaggctacagagacaccctgaagccacagaaagacaaaggaaccggttgaaacacacaacgtgtccagtgaggactttgcagaattctgtaaccagactacaatggccgctcaaaggaatcgctcaaaggaatcaaaggattgcagcgggctggtcctgctctgccttttcttcgggattccatgggaggctggagcccggcagatctcctactcaattcctgaggaattagagaaaggctctttcgtgggcaacatctccaaggacttgggtctggcgccccgggagctggcggagcgcggagtccgcatagtctccagaggtaggacgcagcttttctctctgaacccgcgcagcggcagcttgatcaccgcgggcaggatagaccgggaggagctctgcgctcagagcgcgcggtgcgtggtgagttttaatatccttgtggaagacagggtgaaactttttgggatagaaatagaagtaactgatatcaatgacaatgctccaaaattccaagcagaaaatctagacgtaaaaattaatgaaaatgtcgctgcgggaatgcgttttcctctcccggaagctattgatccggatgtgggcgtgaactccctgcagagctatcagctcagccccaataagcacttctccctaagagttcagagccgtgccaatggcgtcaagtacccggagctggtactggagcactccctagatcgcgaggaagaggccattcaccacctggtcctcaccgcctccgacgggggtgaccctctccgatctggcactgtccttgtcagtgtgactgtcttcgatgcaaatgacaacgcgccggtcttcaccttgccagaataccgagtgagtgttcctgagaatttgcctgtgggcactcagctgctgacagtcacagccaccgacagggacgaaggtgccaatggagaagtgacatattcattccgaaaattacctgacacgcaattgttgaagttccaactaaacaaatatactggagaaataaaaatatcagaaaatctagattatgaagaaaccggtttctatgaaatagaaatacaagcagaagatggaggagcatatcttgcaactgcaaaagtgttgattacagtagaagatgtaaatgacaacagtccagagctgaccatcacgtctctatttagtccagtgactgaagattcacctctgggaacagtcgtagcccttttaaatgtgcatgatttagactctgagcagaatggacaggtaacctgttccattttggcgtatctaccatttaaattagaaaagtccattgacagttattacagattggtgatacacagagcccttgacagggaacaggtatcctcttacaatatcacagtgacagccacagatgggggaagtcctcctctatcaacggaagctcactttatgctacaagtggcagatatcaatgacaacccacctaccttctctcaagtctcctactttacctatatcccagagaacaacgccaggggtgcctccatcttctcagtgacagcgctggacccggacagcaaagagaatgcccagattatttactccctggctgaagacaccatccagggggtacctctgtcctcatacatatccatcaactcagacactggcgtcctgtatgcactcagatccttcgactatgagcagtttcatgagctacagatgcaggtgacagccagcgacagcggggatcctccactcagcagcaacgtgtcgttgagcctgtttgtgctggaccagaacgacaatgcgcccgagatcctgtaccccgccctccccacagacggttccacaggcgtggagctggcgccccgctccgcagagcccggctacctggtgaccaaggtggtggcggtggacagagactccggccagaacgcctggctgtcctaccgtctgctcaaggccagcgagccgggactcttcgcggtgggggagcacacgggcgaggtgcgcacggcgcgagccctgctggacagagacgcgctcaagcaaagcctcgtagtggccgtccaggaccacggccagccccctctctccgccactgtcacgctcaccgtggccgtggccgacagcatcccccaagtcctggcggacctcggcagcttcgagtctccagctaactctgaaacctcagacctcactctgtacctggtggtagcggtggccgcggtctcctgcgtcttcctggccttcgtcatcgtgctgctggcgcacaggctgcggcgctggcacaagtcacgcctgctgcaggcttcaggaggcggcttgacaggtgtgtccggctcgcactttgtgggcgtggacggggttcgggctttcctgcagacctattcccacgaggtctctctcaccgcggactcgcgaaagagtcacctgatcttcccccagcccaattatgcggacacgctcatcagccaggagagctgtgagaaaaacgatcctttgtctttgttagatgattcgaagtttcctatagaggataccccattggttccagtgagttttattttcatttttacttttgttaaaaaaaaaaagattggtttttactttgaagtttgcggcatgatggtggaaagtgtaaatgctaaaacactgatgagtagaatttgatgtttattaaggttttttttttttttttttttttttttttttttactttctggtaaaattcacctagtctcaatcaaggcctatatatcataaggctttgttatgattagctttgcagaaccttgtagtttatagtgttgttgagtacaatattgacaattcctaagacagacttccatacagaagtgcctgtcaatttatatttcctcctgggtggtcacatattgaaactccagccccttaagcaaccctcttgttctgaaggcaggtctggtaagaataggtaagtatcagaaagaaatcacctctggaaacacaacccaaatccaagaatactcaatgcagttcttcccaaggagaagggcaataggcctttttcaaactacattttatatatttttcaatctatactttgtggtgatagttgcagttgaatatactaagtttttcattaatattgaattaacaatttatttataacaatgtatgcttagatttttccagccctatttataactgataacactgcagtatcctttttgcatacaattctctaatttcacactgctatgtggaagatatagcattttaatttaactttcattgctcaatagggatcctgaggaggctatagagggtgaaattaagaatatttgggattctgcttttgtcttttttgttaaattttctagtgactaaggctgaaagtaaatatgggttgggaagacagataaatttgtacatgttcccgagaacaggagcaagagatatatgacaaagctatttcagtggctctttaatgtataaggaggcaaacacctgaaactctgaaaactctgaaattgagaggcaaaataaacttagagtcaagaaagaaatgccatttctgcagatcagaatataaacaccaaccacagctgtaaaaaagaaaagaatatatgcaacgaagggaaattatataaacaaaggatcattggaggtactgatgagttcatttagttcaatgaaaatagtgacgtattaggtagatctcttaattttattactagtattctactaaatgtggtagtataaagtcaaaaagcattccgaagtttctcaagacccttataattccatgatttttttcaggtcagtcaacatttgttgaatgataggtctgtggaaggaaagcacactctttagggtcatagttattaactattaaaccattgaaactattattttatatttgtgttaatgagagtcaaaattattgtgcattcatctcaaataattctattattttgaaaaatacaggttttttttttaaaaaaaactgctcttgacattgtagctattgtgagaaaatattttgattataattatttaaaagcaatacaggacaccctggatgatggtaatgactagggcaatggttgcattccagtacttaagtatgaaataaggaattattactttctgggtgaatataggctagaattgaagacaaaaaaatttgttgcttatcttcagtacttccagcttcatagataattactcttaaaaggaacaagaatgactgcctctggatggaggaattggatagcaatgggccgtgggataggagacctataaaccttcatgctatattattttgtgcctttttaaattttgaagaaaaaatattcatttattcaagatatatgtaaattcagtaaataaaaagatatgatagttatgaccaagtggaaatatatttcctgatgtaaaaggaatcactgaggaaaaagattaaaatattttggctgtcaactcgtagtttaaaaaaaattccttgaaagaggtagagaaaagtcaagttgcagtcccacacagagcctctgggcgccgccgtcggccagtgcagagcaagcgctgacgccggggatccctcagcctctagcctgggattccctgcgcagccaacaacagaaaagaaaaccagctcccacacagaggctcccggctgcgcagaccttgcccagcacaccagattgccagctccgagacccgggactcctcctgtcctgggccgaatgctcttttagcgcggtagagtgcactttctccaactggaaaagcggggacccagcgagaacccgagcgaacgatgggagggagctgcgcgcagaggcgccgggccggcccgcggcaggtactatttcctttgctgctgcctttgttctaccccacgctgtgtgagccgatccgctactcgattccggaggagctggccaagggctcggtggtggggaacctcgctaaggatctagggcttagtgtcctggatgtgtcggctcgcgagctgcgagtgagcgcggagaagctgcacttcagcgtagacgcgcagagcggggacttacttgtgaaggaccgaatagaccgtgagcaaatatgcaaagagagaagaagatgtgagttgcaattggaagctgtggtggaaaatcctttaaatatttttcatgtcattgtggtgattgaggatgttaatgaccacgcccctcaattccggaaagatgaaataaacttagaaatcagtgaatccgtcagcctggggatgggaacaattcttgagtctgcagaagatcctgatattagtatgaattcgctgagcaaataccaactaagtcctaacgagtatttctcattggtggagaaagacaatcctgatggtggcaaatatccagaattagtattgcagaagactctggaccgagaaacgcagagcgctcaccacttggtactgaccgccttagatggtggggaccctccccgaagcggtactgctcagataagaatcctggtaatagatgccaatgacaaccccccagtgttcagccaggacgtgtacagggttagccttcgggaagacgtgcctccaggcacctccatcctgagagtgaaggccactgaccaggacgagggcatcaactcagagatcacttattccttctttggtgtggctgacaaagctcagcacgtgttctctctggattacactacaggaaacattctaactcagcagcctttggattttgaagaagtagaaagatatacgataaacatagaagcaaaagaccgaggatctctctcaacacggtgtaaagtaattgtagaagttgtagacgaaaacgacaacagcccagaaataatcatcacgtcactctctgatcagattatggaggattcccctccaggagtggttgttgccctcttcaaaacacgggaccaagactcaggggaaaatggggaagtcaggtgtagcttaagtagaggtgttccatttaagattcattcttcttctaataattactacaagctagtaacagatgaggccctggatcgggagcagaccccagagtacaacgtcaccatcgcagccacagacaggggcaagcctccgttatcctccagcaaaaccataaccctgcacattactgacgtcaatgacaacgcgccggttttcggacagtcagcctacctggtccacgtgccagaaaacaaccagccgggtgcctccatagcgcaagtcagtgcctctgacccagacttcgggctcaacggccgtgtctcctactctctcattgccagcgacctggagtcacgaacgctgtcgtcctacgtgtccgtgagcgcgcagagcggggtggtgttcgcgcagcgcgccttcgaccacgagcagctgcgcaccttcgagctcacgctgcaggcccgcgaccagggctcgcccgcgctcagcgccaatgtgagcctgcgcgtgttggtgggcgaccgtaacgacaacgcaccgcgggtgctgtaccctgcgctgggtcccgacggctccgcgctcttcgacacagtgccgcgggccgcgcagccaggctacctggtgaccaaggtggtggccgtggacgcggactcggggcacaatgcctggctgtcctaccacgtggtgcaggccagtgagcccgggctcttcagcctggggctgcgaacaggcgaggtgcgcatggtgcgtgctttgggtgacaaggactcggtccgccagcgcctgctagtcgctgtaagagatggaggacagccacccctttcagccactgccacgctgcacctggtgttcgcagatagcttgcaagaggtactgccggatttcagcgaccatcccacaccctctgactcccaggctgagatgcagttttacctggtggtggccttggccttgatttctgtgctctttctcctcgcggtgattctagctattgctctacgcctgcgacagtctttcagccctactgcaggagactgctttgagtcagttctctgctccaagtccggacctgtgggtccccccaactacagtgagggaacgttgccctatgcctataatttttgtgtgcctggggatcaaatgaatccagaatttaattttttcacatctgttgatcattgtccagccacacaagataacctcaacaaagatagcatgctactggctagcattttaactcccagcgttgaagcagataagaagattcttaaacaggtaagtatttaaaaatgtatttaatcctttttatattacaatatgccaatatattccaatatagtggtattattttaagattctagataacttcttcatagagttcgcaaaatataggtcaaatttatggttatcattattaaaacaaaagtttaaattaaatgcctcagtcttcctactattcaaagacattttaaagcaaactacatgggtaatctccggtgacatttttatgaagtaaaatacctttcggttaaaaatataaaatacaggtatatttttacggcatggtattttaattgaaaccctgatgctactcaatttttctcaagtatttcatcttcatttactcaataaaggaaccttgtaagaattatagttaggcatcctacctgatgattttatcgggaccgtattatttccacttccagaaatgtcgttcctttcagtcggttaaaatcaattggaaccaactacaacctacaagttttcagctccagtaatattttgaaaactttttaaaaattaagcaagcccttttaataattactcctttcgcaggtgttcttggtaaagttttaacgtcacataatgtaagtattgtgtatcatcgtttttaagctctacaaatacgtgtgattcacaaaggtgagcgtaatcatttcttctggaatttcttagtcgttgcaataataagaatgggctctaggcgccgctgctcaccaatcagggaatgggaagctgcgcgccattgagtccctccctcccccgcctctaccacacaaagcggaatgagatggatactcacagatcctgacactggagacttagaagtattttccttcgctttctgatatattttggatgtagtcggcctaggacttcatagatacataagccgattcacaaccaaccagctcgagaaaccgcggaatatcggcttagagcctgccatggcgaatcggctacagcgcggggaccgcagtcggctgctgctgctgctgtgcattttcctggggacgctgcgggggttccgggccaggcagatccgatattcggtgccagaagagaccgaaaagggctccttcgtgggcaatatctccaaggacctggggctggagccccgggagctggcgaagcgcggagtccgcatcgtctccagagggaagacacagcttttcgctgtgaatccgcgaagcggcagcttgatcacggcaggcaggatagaccgggaggagctctgtgagacggtgtcctcctgttttttaaatatggaacttctcgtggaagacaccttgaagatttacggagtggaggtggaaataatagatattaatgataacgcccccagcttccaggaggacgaagtggagataaaagtcagtgagcacgcaattcctggggcgcgatttgctcttcctaatgctagggatccagatgtgggcgtgaactccctccagagctaccagctcagccctaataattacttttccttgcaactgcggggcagaacggatggggccaagaatccagagctagtactggagggaagcctggaccgagagaaagaggctgctcacctgctcctcctcacagctttagatggaggcgatcccatccgaaagggcgcagttcccattcgtgtggtggtcctcgatgtaaatgatcacatcccaatgtttacacagtccgtatatcgcgtgagtgttccagaaaacatcagctccggaactcgggtgctgatggttaatgcaacggatccagacgagggaatcaacggggaagtaatgtattcatttcggaacatggaaagcaaggcttctgaaatattccaattggattcacaaactggagaagttcaagtacgggggtctctggattttgaaaaatatagattctatgagatggaaattcaaggccaagatggtggaggtctctttaccaccacgacgatgttgatcactgttgtggatgtgaatgataacgctccagaaataactatcacctcttctattaattcaattctggaaaactctcctccaggtacagtgattgctcttctaaatgtgcaagatcaagattctggagaaaatggtcaagtctcctgttttattcctaaccacctgccttttaaattagaaaagacttatggaaattattacaaattgataacaagcagagtgctggacagggagttggtccagagctacaatataacgttgacagccacagaccagggaagcccgcctttgtctgcagaaactcatgtctggctgaatgtggcagatgacaacgataaccctcccgtttttcctcactcctcttactctgcctacattcccgaaaacaaccccaggggtgcctccatcttctcagtgaccgccctcgacccggacagcaaacagaatgccctggtcacttactctctgacggatgacactgtccagggggtgcctctgtcctcctatgtctctattaactccaacactggtgttctctatgccctacaatccttcgactatgagcagtttcgagacttagaactgagagtgatagcacgtgacagcggggacccgcccctcagcagcaacgtgtcgctgagcctgttcgtgctggaccagaacgacaatgcgcccgagatcctgtaccctgccctccccacagacggctccactggcgtggagctggcgccccgctctgcggaacctggctacctggtgaccaaggtggttgcggtggacaaagattcaggccagaacgcctggctgtcctatcgcctgcttaaggccagcgagccgggactcttcgcggtgggggagcacacgggcgaggtgcgtacagcgcgggcactgctggacagagacgcgctcaagcagagcctcgtggtggccgtccaggaccacggccagccccctctctcggccaccgtcacgctcaccgtggctgtggccgacagcatccccgaagtcctggcggacctcggcagcctcgagtctctggctaactctgaaacctcagacctctcgctgtacttggtggtggcggtggccgcagtctcctgcatcttcctggtctttgtcatcgtgctgctggcactcaggctgtggcgctggcataagtcacgcctgctgcaggcttctgaaggcgggttggcaggtatgcccacgtcacattttgtaggcgtggacggggtacaggctttcctgcaaacctattcccacgaggtctctctcattgcggactcgcagaagagtcacctgattttcccccagcccaactatggggacacgctcatcagccaggagagctgtgagaaaagcgagccactcttgatagctgaagactcagctatcattttaggcaaatgtgacccgacaagtaatcaggtgagatttatttctctgcctcctaattgttggtgtcttggcacaagtcttttaaggagatgttttttgagcctgttatgaaaactgtttggggggggggtggggcggcatatatttagttcatatatatttagagcaatacatgtgagttttactttgcctttcatgagattacgataatctttcagaacgtttttgtgaaagtcatttttcaatcttggcatattttcttttgatttcaaaggggccattcaactatgctggtttggtttgaagtaagttgaattttagtattatttttctattatcagtgtatgaggctctcaatttattatatatagatacaaattaatgattcacaaacactttttatttccatttcaattttgctgtgccttcactgatttgtagttatattccaccattatttgctattactgctaatgttcaaattttgatcctgttgatttaatagcatgctccctctagctctccttctcatctatctatctatacacatgcacacacacttatacacgtaagcttttctctgagcaattttattttgattcttggtggctggtaatatgcttagatcctgttgactatttcaactttgtctcatttcttcatcctatcaacacagacatattgactggcttttaactactggatttccttgggagataaaatttagatcacattttttcttaagctctagatgtcttttccattactatggtgaagttacattgactgttctgaggaaataattgaattattgaactggtattatttccttttattcttttactttggtgtctgtgtttgtatgtatggaaggttttttaatgtagtaaatccatatatagaaataacttgattttgattcagtgcttctcaaaaacctattttcaaatgtgctaaagatgtctacagatttattcaaatagagtagtttgtgaatatataaatagattgaaggtatttggactttaattaaactgatttagctagtatccttctggctatttttttgttcattttcagtgtagttgggagtcatagattccttctttctttctttataaggtcattcttatggcaaatagtacattcagttcttttattcagaccaacttgttattgaagcttgatagttgcctgacatacatgttatctgaagcaatgtctaggaaagccaaatgaggaaaggagacttatctagggtttttgatcacaggaatcatttccataatcaattcagtcaacactctcacatcacttctaggtatttgccccaaattacttggatatttatgttccctttcaagtttagttttctcatttaggaatttaccttatgtcattagttgtaaactgactatctagggctcggacaaaaataatttcaactgtaggaaaggcaagtcttccaacagatgcctacatttttcttgaagtcaagaaaaatgttcaggtattttgagcatctagggataggatttatacttgtggaattccaaactgagaaaaatgatgtaaggcattgtactttgactggaattagttaaataaaaaggatatgaggtatttggctgggaaaaggagattgttccatattataaaacctcatctaaactaacttcccaagatcgtggagaacaaaaaggaagggttggctttgaaatgtgatattaagagggttatgttgattcggaggtagtgataaagttctgttaaggtataacatatagtcccattaaatagaggataaaaataaaacaccatcacatttcatgttattaattcctatggcaacctactaggctatacctttatattctctttatgatgaaacatgaaacaataatccttttcagaaacctcttttataagtgataagaagggtttggctaactttattctgaatatgccctatatagctttcagtgctcctccagttttctctgataaaactaggaggaaaattatctgcacatcagattgaaaataatactgcatatcatttcatagtggtcaaaattttcccataccacttgatggggatgttttcccacaaggtttttgttctacaacaggagagaagactttgcctagttcttccaatatgtgcattgcttctgcttagaaaaaaacaaacttttaaattctctttgctgggttaatgactgttctatagattcccatctctaaggaatcttctttggtagtaaacactggaaaacagtcactacgaaaactcataaaatgtctagtttcctatacattagtccaacacatcagtctaattctgaatcccattgaattagcaaaggcttccggctgcagttttctaaatagactcagagccctgctgttggccaatgtgctgcaagaactggagcctgggatctaccaggacgatattctgttcagtcacagaagcaagtcggagagtggccaagacttgggctttctgctcctgcaaatctgattccatacggattggggtgccctcaaactgggagcattgagttttctatgtatggaagtaaatattttaaaagcactttgtgaaacattttctcttaacgtcggagactgcagcaacgcatgggaaggatgggaaacagggtgaagcagagaagcaggacccggcagtggcaagcactcttccctttcctgctgcctttgttctgcggggcaccctcggagcagatccgctactctattccagaagaaacggtccagggctccgtggtggggaaccttgcggaggacatgcggctgcatgttcaggatttattgacctgaaaccttagagttagtgcagagaaacaatactttaccgtgaacacggagaatgggaacatacttgtgagtgacagaatagatcgagagtcactgtcttcaaaatcctctgtgtcatacccttagagattgtagcagagaatcctctaaatgtttttcacataaatgtgatgatagaagatataaatgataacccacctcattttccccaaaatagcattgttttacaaatcaatgaactagcaattccaggcattcggtttggcctggaatctgctatagatgcagatgtagggcctcactctctccagagttaccagctcagttctaatgaacatttctctctgatgatggacaagactaaaggcaagaacgctccagaattagtgctggagaagcccctgggccaggagcaacagagctctcatctcctggtcctggaagcaatggacatgggtgacccagtcccaactggcactgctgcaattcaaattgaggtcactgatgccaacgataatgccccagtttttagccaggatgtatacaaagtcagccttagagagaatgtgcccccaggcacctctgtactaaaggtgacagccactgaccaggatgagggtgtcaatgcggagatcacctactctttcaaatccctacgagatgatattggaaatatgtttgtgctagaccatcaaaatggggaaattaaatccaaagacttaatagacttcgaatttcgtagcagttataccatgagagtagaagctaaggatggtggaggcatgaccagcgaatgtaaaattatactagaaatcctagatgagaatgacaatgccccagacgtggtttttacttcagtgtccagttctgtaactgaggacgcagaaccctggacggtgatcactctgttcaaaacacatgataaagattcgagagaaaatggggaggttacatgcctcataaacgaaagagttccttttagaatcgaatcttccgccaataatgactataagcttgtaacagatgggaccctggattgggagcggatcccggagtacaacgtcaccatcactgccactgacaagggcaagcctccgctctcatccagcacaagcctcaccctacgcattggtgaagtcaacgacaatgctccggttttccaccaagtctcctacgtggtccacgtggccgaaaacaaccttcccggagcctccatcccacaagtcagcgcctctgacctggacctagggctgaatggccaagtctcctactccatcgttaccactgacttggagctgcgggcactgtcgtcctacgtgtccgtgagcgcacagagcggggtggtggtcgcgcagcgtgccttcgaccacgagcagctgtgcgccttcgagctcacgatgcaggcccacgaccagggctcgcccgcgctcagcgccaacatgagccggcgcatgttggtgggcgacctcaatgacaatgtgccgcgggtgctgtaccccgcgctggggcccgatggctccgcactcttcgatatagtgccacgcgccgcagagtccggctacctggtgaccaaggtggtggcggtggacgcagattcgggacacaacgcttggctgtcctaccacgtgctgcaggccatcgagcccgggcttttcagcctggggctgcacacgggaacctgctggttgctgtgcgtgacggaggacagccgccgctctctgcgccgctacgcttcacctagtcttcgcagacagcctgcaggaggcactgccagacttcagtgacagtcctgtgccctctgattcccaagcaaagctgcagatttacctggtcgtggccttggccttgatttctatgctcttcttcctcgcagtgattttggcggtcgccttgcacctgcgatgctcttccagcccctctgcctggggttgctttcaccctggtctctgttctaagactagaccaggggtttttcccaactacaatgagggaactttgctttattcctgcaatctgtatgttccctcggattctagaaaaagaagatttaattttctcaccatgacaccagaaacagtccccccacaagatctttctaatgaagtttctctggtagcaagcttcactgaagagaataacaagataagctctaactctgttgctcctactcacgtgagttccaatgaatgtctttcatttacaaatggatgaggtttaattttcaaaccaatattttggcaagaaaatcttaaacatattatatctactattgcttcaggtttgtttgcccactcttaatatttcctgttcctttctgtgtgggccagtaacttcattattagctttcatgtatttttgaaacattttcaccatttttacgggagactttttttttttttggacggagtctcgctctgtggtccaggctggagtgcagtggcatgatctcggctcactgcaagctctgccttccgggttctggccattctcccgcctcagcctcccgggtagctgggactacaggcgcccgccaccacgcccggctaattttttgcatttttagtacagacggggtttcaccgtgttagccaggatggtctcgatttcctgacctcgtgatctgcccgcctcggcctcccaaagtgctgggattataggcgtgagccactgcacccggcccggagacattgtttatacacacacacacacacacacacacacacacacacacgtgtgaaaagtgggtattatgatactgctgtcattgagatattttaattgaggaataaatttttttcctgtgatgtttcttgggacatcaatatttgagtatataaggctttttctttaatccattaactataaattttgaagaaaatgcatgagaaaatggagaaaatgtgttttttttttaaaaaaaattgagattaaggtctcattatgttgcccaggctggactcaaactcttgggctacagtaatcctcccacctcaatctccagagtagctgagactacagttgcctgaaactgtgcctggcagagaaaaaagcttaaaaaaataagaacatggtaatgatttgataatattcagttacatttacttttgattcttgtaattcaagtaaactcaattttatgtctgatattttctcacagctacctatatatttcttcccaatttaaaatatattattttattttatgcctagcaaatatctttacagtataaatatttacgctcatgaaagtacgtagccagttatttcttagggagaattttttccctatattttgatgggcttccaaaagtattaccagtaattctcagtaattacaattaggtcagttacccaggaaaaggtaagtctgtaacattctttggactaccaattttcttttactaagtttcctgaacaataaatatttttgaaatataatgtattaatagaattctggagtacttccattatttccagtcaatgcaagttggaatgcttctactttatgctaaaaatattaatgtttctttttcacttgggttcttgttaagtgtgattctgataatgtatacaatcacatatcatttttaggtttccataatatcatgaaaatttgatttttaagcgttacatgtcaacaacctggtaaagtaatccttccattcaggatcattcaaggaatctatttaaaaatattttccccaaattatagctgaatcagaaagtttaaattattatattatatgatttgtcaaaaagagaaactcctagggagacatctccataataggtgtgttgggggaacagtaatctcaaagcagatgcactaacattataagattaaaatcattgtttatagaaacttccaattcatttaaaagctcattggggaaaaaaaagctcattgggaaaaaaaaaaaaagctcactaaagtttctattaaagcgaatacggtagatttccatccccttttgaagaacagtaggtggagctatttaagatataaaaacgaaatatcctttctgggagttcaagattgtgcagtaattggttaggactctgagcgccgctgttcaccaatcggggagagaaaagcggagatcctgctcgccttgcacgcgcctgaagcacaaagcagatagctaggaatgaaccatccctgggagtatgtggaaacaacggaggagctctgacttcccaactgtcccattctatgggcgaaggaactgctcctgacttcagtggttaagggcagaattgaaaataattctggaggaagataagaatgattcctgcgcgactgcaccgggactacaaagggcttgtcctgctgggaatcctcctggggactctgtgggagaccggatgcacccagatacgctattcagttccggaagagctggagaaaggctctagggtgggcgacatctccagggacctggggctggagccccgggagctcgcggagcgcggagtccgcatcatccccagaggtaggacgcagcttttcgccctgaatccgcgcagcggcagcttggtcacggcgggcaggatagaccgggaggagctctgtatgggggccatcaagtgtcaattaaatctagacattctgatggaggataaagtgaaaatatatggagtagaagtagaagtaagggacattaacgacaatgcgccttactttcgtgaaagtgaattagaaataaaaattagtgaaaatgcagccactgagatgcggttccctctaccccacgcctgggatccggatatcgggaagaactctctgcagagctacgagctcagcccgaacactcacttctccctcatcgtgcaaaatggagccgacggtagtaagtaccccgaattggtgctgaaacgcgccctggaccgcgaagaaaaggctgctcaccacctggtccttacggcctccgacgggggcgacccggtgcgcacaggcaccgcgcgcatccgcgtgatggttctggatgcgaacgacaacgcaccagcgtttgctcagcccgagtaccgcgcgagcgttccggagaatctggccttgggcacgcagctgcttgtagtcaacgctaccgaccctgacgaaggagtcaatgcggaagtgaggtattccttccggtatgtggacgacaaggcggcccaagttttcaaactagattgtaattcagggacaatatcaacaataggggagttggaccacgaggagtcaggattctaccagatggaagtgcaagcaatggataatgcaggatattctgcgcgagccaaagtcctgatcactgttctggacgtgaacgacaatgccccagaagtggtcctcacctctctcgccagctcggttcccgaaaactctcccagagggacattaattgcccttttaaatgtaaatgaccaagattctgaggaaaacggacaggtgatctgtttcatccaaggaaatctgccctttaaattagaaaaatcttacggaaattactatagtttagtcacagacatagtcttggatagggaacaggttcctagctacaacatcacagtgaccgccactgaccggggaaccccgcccctatccacggaaactcatatctcgctgaacgtggcagacaccaacgacaacccgccggtcttccctcaggcctcctattccgcttatatcccagagaacaatcccagaggagtttccctcgtctctgtgaccgcccacgaccccgactgtgaagagaacgcccagatcacttattccctggctgagaacaccatccaaggggcaagcctatcgtcctacgtgtccatcaactccgacactggggtactgtatgcgctgagctccttcgactacgagcagttccgagacttgcaagtgaaagtgatggcgcgggacaacgggcacccgcccctcagcagcaacgtgtcgttgagcctgttcgtgctggaccagaacgacaatgcgcccgagatcctgtaccccgccctccccacggacggttccactggcgtggagctggctccccgctccgcagagcccggctacctggtgaccaaggtggtggcggtggacagagactccggccagaacgcctggctgtcctaccgtctgctcaaggccagcgagccgggactcttctcggtgggtctgcacacgggcgaggtgcgcacggcgcgagccctgctggacagagacgcgctcaagcagagcctcgtagtggccgtccaggaccacggccagccccctctctccgccactgtcacgctcaccgtggccgtggccgacagcatcccccaagtcctggcggacctcggcagcctcgagtctccagctaactctgaaacctcagacctcactctgtacctggtggtagcggtggccgcggtctcctgcgtcttcctggccttcgtcatcttgctgctggcgctcaggctgcggcgctggcacaagtcacgcctgctgcaggcttcaggaggcggcttgacaggagcgccggcgtcgcactttgtgggcgtggacggggtgcaggctttcctgcagacctattcccacgaggtttccctcaccacggactcgcggaagagtcacctgatcttcccccagcccaactatgcagacatgctcgtcagccaggagagctttgaaaaaagcgagccccttttgctgtcaggtgattcggtattttctaaagacagtcatgggttaattgaggtgagtttatatcaaatcttctttcttttttttttttaattgctctgtctcccaagctggaatgcagcggtacgatcatagctcactgcagcctcaaactcctaggctcaagcaattatcccacctttgcctccggtgtaacagggactacaggtgcaagccacctactgtctgcctatctatctatctatctatctatctatctatctatctatctatctattactttcttgtacagacaggagtctcactatgttgagcaggctgatctgaaacttgggctcaggctagcctcctgcttctccctcccaaactgctgggattacaggcgtgaaccacagtgccccgcccttatcagatattcttttctggctgggcgcggtggctcacgcctgtaatcccagtactttgggaggccgaggcgggtggatcacctgaggttgggagtttgagaccagcctgaccaacatggagaaaccccgtctatactaaaaaaatacaaaattagccgggcgtggtggtgcatgtctgtaatcccagctacttgggaggctgagtcaggagaattgctttaacctgggaggtggaggttgcaatgagctgagattgtgccattgcactccagcctgggcaacaagagtgaaactctatctcaaaaaaaaaaaaaaaaaactttatcctctagtttcatccattgatgacacttgctttaatcacttattacaatcacctccaaatgaagattttataattccattgtttcttctacagttgttaattggctttctaccttgaagaagagttttatattctctatatatgtttgtttctatgattctggaagcatggttttctattttattcaatggcctgtaatctgttaatatcaattatttattttgatgctgaaattgtcccaggattggcctttgggactccctttaggctgatttctatgtcctttctgttacagcaagcttgggattatatccaagatttgtaattccaatgtacttacttctgtcagtgtaaacaaagtacgatttctggactagatgacttgggcattgtgggggaggtggaaattagaggtattctctgtttttcctgtaggatcttgcatttcttcctcttgctgcttgtctctttgtgtcgggaacaggccccccaaaatctggccataaactggccccaaaactggccataaacaaaatctctgcagcactgtgacatgttcatgatggccgtaatgcccatgctggaaggtagtgggtttaccggaatgagggcaaggaacacctggcccgcccagggcagaaaactgcttaaaggtgttcttaaaccacaaacaatagcatgagtgatctgtgccttaaggacatgcccctgctgcagataactacctcaatccatccctttatttccgcccatctcttcgtttcccataagggatacttttagttaatctaatatctatagaaatgatgctaatgactggcttgctgttaataaatatgtgggtaaatctctgttcagggctctcagctctgaaggctatgagacccctgattccccacttcacacttctaaaaaaaaaaaaatttttttttctgagcttggagaaatatatcccttagtacacttggcatttataaagcagacatcaataaatttatatatatgtgacagataccaacaacaatccagtccccttccctcataccttatttatgtacatatattttatataatagatataatttattaacaatttataaaattactttgttaatactctatatcattttctagctgaatttatcaatgataatgctcttttcccacttttatttttttcccattgaccatgcagcagttttgtgtagaccgtctgataacaactgatctgtttatctaggggggagaaatctaattcaatggaaaatataaataaaattgtgataaacttttgtaaatagagtggcttttaactacacttgagatggctagcaaattcataaagtgaatttactttctttcaaagttcagtaattctttctggccattagggatatgtccatttatactttctcagtatcccaagtcatttcatggttttaaatcattcatgaacttccaaatatagtgaatttatttcttctgcatttaaaattttatcacttaaatatacaatataccgtattgccatgacgaaaaatggtaaagactatttttcacttctgttatgcatttcattaatacgatatctgtatgtgtttccaagttagacatttcttttgcccatttcctacactaatgatactaatgatgactttgtggaatattcagaattaacaaaatgtgttttgagtgctttttttagtactggggcaaatttgcagtaatatcgcctgctttttacattaaattccccataacttttacaactatgggaaaatttctgaaacgtgcacagattccaagtgttttctgagaactttatgcttattgtagagtggttacagacactgaatgctaaagtgtattactctttgaaaagcattgcttgatttcttttggtgaattctgtaaaggtgcagggaaacataacgtcccaattattttttctttcttctttgtttgctgcctatctactttgaaagatacaatagttaaaacccagaaaagagattggaaaccccttagagaatgaaagacatccaagggctctaaaatgcggcagttgctgcttctgagaccaaaaaagggggcaaaatatagagtgtgtggttctacttgtgtgattttttgaaagaaagtatttgaatttatctaaaaatactaaatttgtatttacattagttttcaaatagaatttaataagtacagtgttctataggtaatattgagagaaatagaggacaatgaaacctctctcctccatcatcttgtatgaactaccaaaatgtttatcatatggacagttctcatatatagtcaaatagaaagaaagacataataggaaaacaaatgacttgggaaactaagctaacatggtctaattattctgacctctgctcacctaacttgatttaggaacaaatcattgagagttagagcatgaatagtcaagactgttagaccatatctcaaatatcagtgacttcaatcaactatgtttccagtttaagctgaataggctttattaaatagttgttgaatgaatggataaacaaataatgtactctggggattacctgataccaggattctgaattttcagatgtatcatagaaggatagcagctttgcaattaggtaaattgttaactgtgtcacctttagcaagttatttaatctctttgagcttcagcaaagtaggaataatcatatctaatttgaaaggtcgtggtgatggctagggctaacaaaaatctgattcacaacatgcaattaattaacagtagccatttttagtggttgaccaaaaaaaggatttatattttcaatgccagcacactcgatgttctgttgggaaaaataataatgatttttgtgtgcttctccatatggtataatggaatgatttgtggatggaaataaaactgttctaaaatttttgtgacagctggtttaaaaatcttaagtgcctaggcacattcttgattgagaagccacagttttaggccataaaagatgggggaaagatttttatatgagacaattttgtgagtgttactttttctttgtctgaaccatagtgaaatctaaacaaggatcttgtgaaacttattttaaagaagcagtttacttcaatgggatcttagataatttcaccagaaaatggatcaccgaaaccagaaggctggtgatcattatttggtttgggccatataagaattgaaactaacggcttagctttaggatttttaggacacttgttgataatttaggattcataattaacatatgtgttgattgttttctgagactaactgggcaatgggtttggatgtgtttacatttattctgattccagtcataaaattatgtcaaggactttccttgtctttttatgtgtatgacagatgtgtatgtatccatttcatctaacaagttaaagcgttcagctataatttaaaatttgtagcttcactgttttatagtacctaaaattggaatgtaatcagtcagaagacattcatccactgctttcattccagaagtattatgctttttgaagcagcaatagcataggaatgttgaggagactatactatacttttatagcatatttaatctcgtagatcacttttcaatgaattataaggctgatgacaaatgagcaaattgtatcagttttctttatgacatgtaacagagtatagctgtgatcatgaattggatagttctggtgtaaaaatctgctttatccccatataagatgtcaggttcagaaaagcaaacacatagtttcgaagagatgttgatcaaactgatgaggctaaatctcaagaaagagacacagttaccctctaatgttacactttgagttcacctttttttttttttttgagacagagtctcaatctgtcgccaagctggagtgcagtggcactatcttggctcactgcaacctctgcctcctgggttcatgctattctcctgccttagcctcccgagtagctgggactacaggcacacgccaccacacccagctaatttttgtatttttagtagagatggggtttcaccatattggccagaatggtcttgatctcttgatcttgggatgcacccaccccacctcagcctcccaaatagctgagattacaggtgtgagccaccatgcccgaccactttgagttcacttttaagaaaccatacttaatggaaaattaccagtaacagggcatactgtttaggatgcattcctaaaatattaatggcaaaagatagccagcctatggcaaagctaattggaaaaaatattttataaaggatgagacttctggataccatatgggaagggctctggttcaggaaaatgtttttaaaaaactgtcattgaagagaccatagaatcaaacaaaataatttaatctgtatgtaaaagaagttggtaccaccataatttttcttatacatgtcatataaggatctactctgtgtattgtcattgagggcagatataatttcttagttcatcattaactctctgaagtatttcacacagtagtttgtacaccttctaagtactcaatacaatgcttgagttcaattattggaaagtggtctcttggagaaaaaagaatcatagtgcaaaaccaattattttacatggacttttcctctatatctaagccctaataagaggcagctgtctgatatacatacatacatacatacatatatatatatatatatatatatatatatatatatatatatatacacacacacacacacatatatgtatatatatatttggagtaggggatggagtcttgctctgtcacccaggctggagtgcaagtggtgtgatctcagctcactgcaacctctgcctcctgggttcaagcgattctcctgcctcagcctctccagtagctgggattacaggcgcctgtcaccatgcccagctaattttttaaaatatttttagtagagacagagtttcatcaagttggccaggctgctcttgaactcctgacctcaggtgatccacctgccttggcctcccaaagtgctgggattataggcatgagccaccgcaccctgccaactgtctgacttatcttaaaaggctaaggacctggtttgtttgtcaaattttgaaaatagatgcctcagttcataagatttccatattgtgtggcaggcgcctgtaatcccagctactcaggaggctgaggcaagagaatcacttgaacccgggagacagaggttgcagtgagctgagatcacgccactgcactccagcctgggcgacatagtgagactctgacaaaaaaaaaaaaaaatccatatgtgaaaattcttagaagcttcctatacaatttcagctgaagattcagccaacagttcattctgagactgtgttccatggaaaaagtaaagcccaggcatggaagtgggaatggaaagaaagattctaagcctacaaatactcaaacatcaagaagaaataaaaataagtcatcacttcgacttcatgtgctaacatcactgaggttataaattcccaggaatattttattgcgggagcaagactgcactgctgcctttcagcttgcaaattccagtgagaaacgtctttctctctgctctcaactaactctacagaacgctgtcctctcatttcttcaggctgcagttctagagtagggactcagagtgccactgttggccagtctggaaacagagataaatgagccaatccccagacattccggcttggtggcttttctaatttcatggaatgcaaatccaagagcagacccacaacattcctattatggctcctagttctacaaattataagcaggaacggaacggatttacaggcaatgagttcagctccttcttggctggagattctataatccaagaagagtttgaaaaggggcttatttgggctggagcagcagcaactctaactgtggaaaaggtggggaatggtgctggactgacagtctgggtagaaccaaggcgactactgcctcctttcctgctatttctatcctgctgggcattctctatgatgcagatccgttattcagtcctagaggagctggccaagagtttggtggtgggaaaccttgccaaggatctgggactcagtgtcgaggacatgcccacttgaaagcttcgggttaatgctgaggaataatacttcattctaagtggggaaagtggagacttacttgtgaatgactgaatggatcaggagcagatacgccccccaattatagcttgggccataacgctttgaaatagttgaaggccaggcatggtggctcacacctgtaatcccagcactttgggaggccgaggcgagcagattacgaggtcaggagttcgagaccagcctgaccaacatagtgaaaccctgtctctactaaaaatacaaaaattactgggcatggtggtgcaggcctataatcctagctactcggggggccgaggcaggagaatcgcttgaacccgagaggcaatcgcaccactgcactccagcctgggtgacagagcaaggcgccatctcaaaaaaaatgaacaaacggtagttgaaaattctttaaatgtttttcacattaatatggagattcaggatatgaagaatcatgcaccacggttcagcaggaatgttattaagttacgtatctctgagtttacccagctggaacaagatttgcaacagaacctgcagaagatcctgatgttgagagaaattccttacaaaattatcaccttagcagcaactctatatttctctttgaagtaaaagtgaccaacagtggaaagacatatgttgatcctgtgttagagaagctgcttgactaggaaaagcagagctcccatcccttagtgctagcagccttagacggccccccaacaaagcagcatcactcaactcctgatcctattggttgaagccaatgacaaccctgtgttcatctaggatgtgtacagcgtcggccttcaggaagatgtgcatccgggcactcctgtgctgagagtgagggccaccaaccaggactagagtgtcaaggcagagatcacatatggcttcacaacccagagtacccatatctagtttggccttgatcaaatagtggagaaatgaaaactttaagtacattggacttttaaagatttttaatttccatggttttggtagcaagtgacagagagggactcattgtccagtgtacagttgagaccgaatttctagaagataatgacaatatcctagaggcgatttttacttctaattccacaatgattcccaaagattctgcaccttggacagtaatcactgtccaggatttaaatcacaagatctttaaatcacaagatctggattcgggagaaaacgaggtcacatgtctgatataagaaaatgcaccttgagaaaaatcttcctccaataattaactacatgcttgtaacaaatggggccgtggaccaggaacagacccaaggtataacatcagcatcactgccactgacagaggcaaaccaaccctctcgtccagcccaagcatcaccctactcattggcgatgccaacgacaatgctctggttttctaccaggcctcctacgtcgtccacgtggccaagaacaatcttcccaaagcctccatagtgtgcaagtagacacctccaacctagacttgggacccaacagccaagttccctattccatcgtggccagtgacctggagccacaggcgctgtgattctaggtgtccttgagcgcacagtgcgccttcgaccaagagcagccgcgagccttcaagctcacgctgcaggcccgcgaccaggactagctcgcgctcggcgtcaacgtgagcctgcgcgtgttggtggacgacctgaatgacaacgcaccgcgggtgctgtaccccagctctggagcgcaatggcttcgcgctcttggatatggtgctgcacgccgcggagcctggctacctggtcaccaaggtggtggctgtagacgcagatgtgagacacaatgcgtggctgtcctaccacgtgctgcaggccagcaagcccaggctcttcagcctggaatgcgcaccgacgaggtgctgacagctcgcacgatgggccacaggaaagcgactcgccagcgcctactggtcgcggtgcactgcggtggacagccgctcctctcgctaccgccacgtcaccaccactaccgcccctcgtcgccgacagcctgcaggagactctgccagacctcagcgatcactctgcaaagctacagcctgaatccaaaattaatttatatctggtgattgccttagctttaatttcctttttattcttcctgattgcattgtttgtgctggttttaaagtgccgaagaccccaaaatgatcctgtctgagtctttcccacggatgtctatcccgcgctaagccccaggtttctgggtaactgtagctctatgatgccatattcctaccaggtgtgtgcttctcctacgaatccagggctgagtgaacttcttttttgaatccctacccctcaggactcaatagcagtttcactgcagaaagccccttggggaaggggatgattgtgattattctaattgcttgggcagaatccactctccaaggtgaaaaattcttgatgaaactaagttcagtcacaagcaggttttcttctagcattaaatattttcagagatctcagtaaaaagcatttctagcagcaagaccaaaggcctaagatgagaaatatttggcatggtgagcttgagggacagtagtcaggcagacaagagtatcagacatgccagagcatttggggcctgtaggtaaggagcatgttttgattatatatatttgtatgtgtttgattatattttataattttactttgatattcaaattgtactgatccaaaaataagggagggacaaatcttggccattgtagtatgagagatgtaaatttacaactcagaatccctgcttatcacttctccttcagcacacaactgtttcattttctatttaagaaacttcctctcactgcaaaaagacattctggctgataaagttagcctataatttcagtaaatctaagaatatgactaatggaagttgccagacctaaactttgaaaattattgttccactgaagagcgtcttatgactgagtgttccagtctccttctcaagctgaaccttgcttttcaaaccagattaagaacactatcataagttatactgcattttatttccctacccatgtccactgcatcattctctatagtacaaagagcttgtctcgccaggcgcatctataatcttagcactttggggcgccaaggcgggtggatcacttgagcccaggagtttgagaccagcctggacagcatggcaaaaacccatctctacaaaaaaaaaaaacaaaaattaacaaggtttagtggtccatgcctgtggtctcagctacttgggaggctgaggtgtgaggatcacctgagtctggggagattgaagctgcagtgagctgtggttgcgctcctgtactccagtctgggtgacagaattagaccctgtcccaaaacaaacaaacaaataaagagcttctctccttatgacttatttaaagcttgggaaattgttccaattcaaatgctttaaatggacttgagctaaaacagaatgtggtatatgaaatgttcttataatcaggtgattgtaaaaattgatccagataatgttagcatagcattttactgaactagtagtttacaaacacttcaaaaattatagaataacatttgcatataaaattcctcatacatttccctatcagtgaattggaagcttacaatatacaatattaccaaaaagacaaaaaaaatgaaaaggaaacagttacctttggaaaacataattaggtaaaatgggtaatatggaaagtctgaaaactgaaaaaattactgataagtcaagagaaaaggaatattagtaggaaaattcataaaagtgtgtctgactactcacagcaggtttccttattggtatgtattctgtggtccatctaagctatgttaattttattttaaatgctacctgggtattggcttctaaaaggaattcagtaaatcagataatttggcatcttcaatctagattctgatgctcacctgaaaagtctgctaaggattggaaaccaagaaaagtgaagtatctcaacagatatgtgtcacttgtgtgtactggattttttttttttttttttttttttttttttttttttgagatggagtttcactcttgttgcccaggctggagtgcaatggcatgctctcggctcactgcaacctccgcctcccaggttcaagtgattctcctgcctcagcctccctagtagctaggattacaggcatgtgccaccacgcccagctaattttgtatttttagtagagacggggtttctccatgttggtcaggctagtcttgaactcccaacctcaggtgatcttccctccttggcctcccaaagtgctgggattacaggcatgagtcactgcgcccggtcgcgtactggatttatattgtgtaatactttgctctagcagtatagtaggtgagacagtgactgtgtctagtgagcaaaaggcacttatttgacacttttgactcttcctttctacttaccttatttaaaattgatttttgcatgtggcatgatgcaccagttcattgaggtaggggttgaagttatttcccatttttttcaataccatttattaaaaatattttcctctttctgttgaatttgcttggtgcctttgttgaaagtcatttcactgatatatgtagttctatttctatattcttgatcatgtttcatttgtctattcttttactaatagcacactgtctcaattattgtagctttatagtaagtcttgctacaaagtcttactacaggacaaagcttgtaggatttttgaatgggatggcattgcatctatacctttatcagggaaagagggaaggagggaggaggatcatcttaacaatattgacacttcaaatccatgaacatggtatatatttccatttaattaggtctttaatttctctcagctatgttgtatagttttcagtgtagagaggtcatgtatatttctcattaaattgtccctacatatttgatgttttctaatgttattgtaaatagtatttttaaaattgtatcttctaattgttcatttctagtttacagaaaaatgaaaaactatgtttttatgtattctatatgcttttgaaaagtaagaggtgcaaagtgctctattcttacactatattgtgtgagaatataagtcgaaaccactctgcataagttcaggcttccattctcttcagtttgtaggttgagagaacccatccagaaacagtaaacattggtgtctgcccaagtctggtcctgggtggttcattcattcatttacataacaaatatttattaactgtctgctatatgcaaggcactgacctatggactaaggatgcagcaatgaacaaggcatatatgattcctgagttaatgggccctattctaatacatgatattttacaggtctgataaaagccaacaaggagaaatacaaaagcactaagagaaagcttatagtagggaagcttcgcctaatctgaaggtcaaggaaggctttctttttttcggaaagtgatatttagagagatgaatagattaataggatgagtagaagttatctaggtaacaaggaaagtaaaaaagaaattgtcaggcagaggaaatagcatgtgtaaagatctttttaaaaaataaaaggtgtgactcaagcaatttaaaagggctagggaggctagaaacagaaaataaatagatgaaactaataaggcagggagagccttgtaaatcacacttaaaattctggattttgttctaaatacccttgtacttaggagctattaaaatattttaaacaaggcagtgacaagatatttgaattattaagcttactctggctgctatatggagaattgatttatgagggttataaatagaaataggaagataagataggagactatggcaatattcctggtaagaaatggaagaagagctggcttggattaaaggggaggcagtggatgtagaaataaatggatgaattatagatatatttaggaaatgggttcaataagacttaataatggaataggtggaatataaatttcatgagggcagggggtgttttgtttattattatattcctaggtgtctgaaaatattgttgtgttgcctggcaagtggtagatcttcagtgaaatattattaactgaataaatacaatggataaatggggagcagggattaagagtgattcctgggtttccacattaaggaactggatggacaaagctaccatttgatgagaatggaagactaaagaatgatagatttaagagaaatcgagttgagttccagccatgttcatttgaaggatctgagaaacagtgcagatattcagtgtgtgattagacatatggtcatcattcttttttttttttgagatggagtctcgctctgtcacccaggctggagtgcagtggccctatctctgctcactgcaatctctgcctcccaggttcaagtgattcttctgcctcagcctcctgagtagctgggactacaggcgtgcaccaccacgcctggctaatttttgtatttttagtacaagacagcatttcaccatattggccaggctggtctcgaactctgatctgcccgcctcggcctcccaaagtgtggggattacaggcgtgagccaccgcgcccagccggttaccattcttttactctgagttcttccattgtgatcatctagtcagatgggtagatccttataaggctgagcataataagcttcctgatagctctacactggtatgttttggggttcatggctgagctacttttgtgttttatttatcttcctgatctctttttcactgtaagaaacatccagcacccagggaaatttgctgtctaattcatactccactcttcagactagtcctagtgttcagttttgttttgttttttttctgtgtctggaattctattaaaatgtgtcaggctgttttaatttttgttgtttaattttctttcacatgattatatgtgctccatggatttttttgtttgtttgttttttgtttttgtttttgtttaagcggggtcttgctcttgtcgcgcaggctggagtgcaatggcttgatctcggctcactgcaacctccgcctcccgggttcaagtgattcttctgtctcagcctcccaagtagctgggactacaggcacatgccaccacacccggctaatttttgtatttttagtagagacgggtttcatcatattggtcaggctggtctcaaactcctgaccctggtgatctgcccacctcggcctcccaaagtgctgggattacaggcgtgagccaccgcacccggaggaaatttttaacctcagtttttcttcaccatctgtaaaactgcatagaaggaatgtttaggataaaagatgcataacaatcataacaaaattgttgggttttaatgttatgagtacacttggaggattctatgtccacacataccttaaacatcctatagagtccttagcattttaaagttgaaaccaacagtatgaatgatggtagaattttcccccccaggaagttagaactgttccatatcttgatagagggatgggttataaggatgtacacattttccaaaactcattgaacttaagagtcttgcatgtgactgtatataaattatactttaattgaaaataaatttaagaaaataaaattggctgggcgtggtggctcacgcctgtaatcccagtgctttgggaggccgaggtgggtgaatcatctgaggtcaggagttcgagaccagcctggccaacatggtgaaactctgtctccactaaaaatacaaaaattagctgggcatggtggcggacacctataatcccagctactcgggaggctgaggcatgagaatcgcttgaacccaggaggtggaggttgcagtgagccaagatcatgccattgctctccagcctgggcaacatgaacgaaatgccatcttaaaaaaaaaaaattaaaagaaaagaaaattagcctcccccaccctcactatacctcagactcacccctgaaagatcactactattcatccctggttatgtacacttacaaacattttctgtgtgtatgcgaatgtatgtgtggggttttctttgcacaacaggatcattttacagtatatatactgttgtgcaacttgctctttccacttaatatctcaaggaatcttttctttgaatctttatagccatgtacctcaatcttagtagttttctttattttatttttgaataggaaatacatttacatggttttaaaaatcaaaacaatatactatgtatatattgagaagtctgacttccatccctatcctactcctattccacccttgcttcctcctgtcccctgtaggtaaacattttataactttattaagcatcctgtcagcatttcttatgcaaatatgtacatatatttttatttccccattttttttacaaaaagataaaatactatacaccactttatatcttcctttcttcacattatatcctttaaaaatatttccatattggccgggcgcggtggctcacgcctgtaatcgcagcactttgggaggccgaggcgggaggatcacgaggtcaggagatcgagaccatcctggctaacacggtgaaaccccgtctgtactaaaaatacaaaaaaaaaaattagccaggcgtgatggcgggcgcctgtagtcccagctactctggaggctgaggcaggagaatggcgtgaacctgggaggcggagcttgcagtgagccgagatcgtgccactgcactccagcctgggcgacagagcaagactgcaactcaaaaaaacaaacaaacaaacaaaaaagaacttccatattaatatatagaaagctgttttttttaacagttgcttagcattcctttggattattaaccagtctcataaatgagcgctattgaatagccctgtacctacatcagtttttacatatgcagtatatctttgggatgaattcccagaaatggaattgaaattgctgggtcaaagaggaaataggtgtaattttcttaggtattttcacaagaagtgttaattctaactttctgttttgaaatgatttcaaattttcaaaggagttgcaagaattgtacaaagaactgtatctccttcacccggatgcaccgggtgaattatatgtattatataattgtatctgtaggccaggtgcagtggctcactcctgtaatcccagcactttgggaggctgaggcaggtggattacttgaggccaggagttcaagaccagcctggccaacatgataaaactccatctctactaaaaatacaaaaattagccaggcctggtaccccatgcctaagggtgaggcatgagaaatgcttgaacctgggaggcggaggttgcagtgagccgagatcgcaccactgcactccagcctgggcgacagagcaagactctgtctcaaaaaaaaaaaaaaaaaaagtaaaaaagttttttaaaaagatgtatctatatatacatatttacatacacacccaagtgtgtatgtatatatgtttgtgtgtatgtacacaaacacattatttttatatgatatgatttttttatgacatgattatttttatgacatttgagagtaagttgtagaaattatgtttctttattcctaaatacctcattgtgtatttcctaacaaggacattcttttatataattaaattttaataataaaaatcagaaaatttaacatcaatgcaatataattatttagcctatagtccatatttaaattctaccataccttatagtatattttactatacctcatagtaattttttttagtccaaaatatcacacattgcatttagttgccatgtctcttttttttttttttttttgagacagggtctcactctttcgcccaggctggaatgcagtggtatgatcttggctcactgcaacctccgcctcccaggttcaaatgattctcctgccttagcctcctgagtagctgggactacaggcatgtgccaccacactcccaccacacccagctaatttttgtatttttagtagagacaaggtttcactatgttggccaggctagtcttgaactcctgacctcaagtgatctgcccacctcagctaagtgctgggattacaggcgtgagccaccatgtgtggcctagttgccatgtctctttaatctactttaatctgaaacagttcctcagccttgtttgtttatatgaaactgacatttgtaaagactagaagccatttgtcttgtataatgcctttaatttatatttgttttatgtttcctcgtgattttatatatagagtttgtttgtttgtttgtctgtttgtttgttttgagatggagtctcattcttgtcacccaggctggaatgcagtggcgcagtctcggctcactgcaacttctgcctcccaggttcaagcaattctcctgcctcagcctcctgagtagctgggattacagatgcctgccaccatgcctggctaatttttgtacttttagtagaaacggggttttgccatgttgcccaggatggtctccaactcctgacctcaggtgatccgcccgccttggcctcccaaagtgccgggattacaggcatgagccaccgtgcccggacctcatgattgtatttatttatttatttaatattattattattatttttttttttttgagatggggtcttgctctgtcacccaggctggtgtgcagtggtgcgatatcggctcactgcaaccgctgcctcccagattcaagcaattctcctacctcagcctcccaagtagctgggattacaggcatgtgccaccacacccggctaatttttttgtattttttttagtagagacgaggtttcaccatattggccaggctggtctcgaactcctgaccttgtgatccacccaccttgacctcccaaagtgttgggattacaggcgtgagccaccacacccagccttatgattgtatttagactagacatttttttggtagtatattatttagccattgctgtgtaacaaattatcccaaaacttagtggcttaaaagaagcatttattatctcataaattttgtggatcaggactgggtatagctttgctgagtgcctctgcctcaaagtcttacaaggcagcaattaaagtgtcacctaaggctattgtcttatctgaagggtcaacagaggatggatccgcttctaatctctctcacatagttaatggcaaaattaagttccttgtggattgttagactaagggttccagttccttgctggttgttagcttgaggtctacctcagttccttgccatgtggacctccatagggcaaccagcttctgttagagcaagtaaaggagagtgccagagagggcaaatgtgatgaaagccacaatctttttataaacctaattttgaaagtgacatacaaggctaggcatggtggctcaaacctgtaattccagcactctgagaggccaaggagggtggactgcttgagcccaggagttcaagaccagcctgggtaacatgacaaaaccctgcctctactaaaaatacaaaaattagctggtctggtggtgcatgcctatagtcccagctactcaggaggctgaggccagagaattgcttgaacccaggaggcggaggttacagtgagccgagatcacaccactccactccagcctaggccacagaatgaaaccctgtcaagaaagaaaggaaggaacaagggagggagggaggaaggaagggaggtagggaggcagggaaagaccgagaaagtgacataccatcatttttgctgtagtttgttcattagaagcaaaatcacttggtccagcccacactctggggagatgattttctaactccatttgtaataacttattctacttttattagttggcattatacagtaagaaagagctttcttttctcttcttatttattcatatatggctcatgtgttttttccaatgagttatattctattactaacattttttattttgacctcaaattgttttagatgttaccaataagaacctcttcaagctggttcttgtgtccttttgccataactctctcattttcttgaaccctttcttactttctgatataagaaaatattagagactcatactttccttgttccagttctgagatgaaccatttatccaaaagccttgcttcattttagtagggaatagtatttagaaactaagatctgggtgtgaggtatgctcactgctaatgggctgtcactgtttctaggccttgtcagcagacggagctaggaaaaacacacataaacacacccatatttatatttgtacacacactccctcaaaatcgtgagttcatattgatacctccagttctggttcttcctagccttccccctttccatctttgtatttttattttccaacagtaagaaccctggctcccagtgctatgaatatatttactcatttgctccatccactgcactccagcctaggccacagaatgaaaccctgtcaagaaagaaaggaaggaatgagggagggagggagagaggaagagagagaaggaagaaggaagggagggagggaaaactgagaaagtaacataccatcatttttgctgtagtttgttcataagaagcaaaatcacttggtccagcccacactctggggagatgattttctaactccatttgtaataatttattccacttttattagttggcattatacagtaagaaagagctgctgaagatttgcttgcaattggttgtctttaaactgagggtatattgtcaaagtactgtgctgaaaagttacctgtagtatagttatgtgattcattaaaataaagtttgtttctattatgtgcagttttagagttttgccacactctggttgattagtatattttctgttgcttttttgttttgttttgttttgttttgtttttgagatagggtctcgctatgtcacccaggctggagtccagtggtacaatcacagctcactgcagcctcaacctcgtgcacttaagcgatcctcccacctcagcctcccaaatagctggggctgcaagtgcacaccaccatgactggctaattttttaattatttatttatttatttatttattttagagatggggtctcactatgtttccccaggctgaccctgaactcctggggtcaagtgatcctcctgccttagcctccaagtgctggtattacaggcataagccaccacacctagcctagtattcttttttgaatatgtaaaacattaacataaagtcaaaactattaaaaaaaggtgtactcagaaaattgtcattcctcccctataccttctgcctcattcacaccacactctgtagataatcgatttcattagtttgtggtttatcctcactgtgtttctttttgcaaaacgcaaaaacaaaacctatacatatttatattttcttatgtcctcttctttcttacacaaaaggtaacacactatgtaggtagtcctggctttgaacagtttcactataaaaatatttgttactacagcttaaataacataagtctcctaaaaataattcaaattttagttaccatggtatattaactttgagtagttccataaaggacaaacttggctgctagcccttcagtccacagagcactttgaaaataacagatgagcaaaataatgtggccaatcacatgacttctttcaaagtatgtcagtgatcagtcactgtgtgcctataatttagttcatgcacagacagcaaagcatgtagttgtgttgccttccagtgataaacccacataacattttagaaaaatgtattaagaattggccagcaaagataaaagtgcagcaaagaaacaaaagtgataatgttttcagtgaaatttgaattgaacataaatggagttatagaagaaatagctgaccatgggaatgttcacactgctactttcaagaatctctagaagggcagctaaaggagcttagtgaaggtgaatttattgacatgaatgagaaaagtaattgtgatgaaaaggatgaagatgtcccagagaaagtaatgccagcaaaaacttcacattaaaggaactctcagatatttcaaagcattgaaacctccaagaataaataaaatgttggaagttgatccaaacttagaaaggagtatggcaacttgtcaagatgaagaaaaggtgcttattcctttttatttatttatttagagacagagtttcactcttgttgcccaggctggagtgcaatggcatgatctcagctcaccgcaacctccacctcctggattcaggcagttctcctgcctcagcctcccaagtagctgagattacaggcatgtgccaccacgcccggctaattttgtatttttagtagagacagggtttctccatgttggtcaggctggtctcgaacccccaacctcaggtgatctgcccacctcggcctcccaaaacactgggattacaggcatgagccaccatgctccacctgcttattccatattatatgttataggatgaaaagaggccaaactaatcttgacatgttttttacaaggaaataatcctccatggttctaatttttttttttttttttttttttttttttgagacagagtcgcgctctgtcacccaggctggagtgcagtggcacgatcttggctcactgctagcaccgcctcccgggttcacgccattctcctgcctcagcctcccgagtagctgggactacaggcgccggccaccacgcctggctaattttttaaaaaatatttttagtagagacggggtttcaccgtgttagccaggatggtctcgatctcctgacctcgtgatccgcccgcctcggcctcccaaagtgctgggattacaggcttgagccactgcgcccggtgggtctaatgttttaaattacactgtgttaaataaatattagtttgttggttttttttttagtttttttatttctctacaaatttacaaccaataagagtttttaatgctttgacaaaaaatgttaaaggtcatagtacaatcgcatttcttcccattgattattaacatcactttacatagtttcatcttgcattagcaattttgtgtgtgtgtttgtggttttaaggagcggagagtttaataggcaagaaggaagggagaagacagaaggaaggagctcccccttacagagacagagggagcggggctccaaaagaggaggtccccatctaccgcggataccagccaggtatatatgcagaggctggtggaggtgatgtctgatttgcatagggctcaggggattggtttgaccaggcatatcattcacgtagcccgagaaaaagctggccctcccaccccagccttttaatatgcaaacgtagggcgccatggatgttctaaacacgtggagatatgtggggggcagccatgtggccaggaacttgtggggcaagggcaagaaggctgtgggaatcgccaagttgaatggacctagtttctaatggcctgcatttgcatatcaaaggttgctggcctggctcctagagccggggctttaaaagaaacttttccggagatgctttaaaaaatgaaaacttcccaaggaccccttttcctgtctatctgcataaaataatttcttttattatttatttatttatttatttatttatttatttatttatttatttatttattttgagacggagtctcgctctgtcgcccaggctggagtgcagtggcgcgatctcagctcactgcaagctccgcctctcgggttcatgccattctcctgcctcagcctcccgagtagctgggactacaggcgcccaccaccacgtccggctaattttttgtattttcagtagagacgggatttcaccgtgttagccaggatggtctccatctcctgacctcctgatccgcccgcctcggcctcctaaagtgctgggattacagaataatttcttaataactcctaccacattcctccctgtggcgatatcaaactaactgctgttaggaggctttgggcgaccattgcttctggctacttcctgctgaaaaggggcgtctaatggagaacagcagctagggctcctcctggggttgatctaagggtcctcggaagaatggcgtccatgtgtggttcagtttacagcaccgtttggagtttgattgcttctaggcgagaagaaacaattcaagttatagtattgagtatacagagtccaaatatcaatacaagacatataagcaagagagtgcttaataaaggggttaaccaattccataaagaagactggaagtaattaaagagggattgtagccactcggggctgaagcccacattttccctgagcctgtcaataattttgatttgatttttaagtccctgtagatttgcctcttctttactacaggtgttaatcccaaagaagcatgtttcatttaaaaatgcattactggccaggcgtggtggctcgcgcctgtaatcccagcactttgggaggctgaggcgggagcatcatgaggtcaggagtttgagaccagcctggcctacatggcaaaaccccatctctactaaaaatacaaaaaattagccatcgtggtagtgggcgcctgtaatcccagctaattgggaggctgaggcaggagaatcgcttgaacccgggaggcagaggttgcagtgagccgagatcgcaccactgcactccagcctgggcaacagagcaaaactccatctcaaaacaaaacaaacaaacaaacaaacaaaaactgcattactaaatccaataaaaagtcctagtagactcagtgatagtaaaactttcatgcttcctttttgccagtaactattatccctgctataaggatactaattaagcaaaatacgacagcaatggaaactctgtccaatatttcagttagaaggtgctaccatggataaccctattgcaaatagtagagtgaggaaagcagttcccacaaatgtggtgtggtaggtaatttccatctaaaattttacttgccaacatatagaattcccctctgtgggcctacgaagttccttggttttattttcccaaacaaagaaacctccgggttacaggtaccttacttactttcattacctggcacaatttgcaaaataattgcccagaactagcatattgattcacattttcacattacccatccctttttcccccccaccaagctgcagaagatcaccacttgattcacaggaataagcagggccagggttagtctaaaatgtaggcaaaaagcttaaaaacaattaatgagactagggtttaatgacaaatgtatgataagctttggagcaaaatttttctctccagtcctcatttttggtaaaaactaattatgaatgaactttaatcttatacttggcctgattatttgcatgaagtgcagcaagaatggttatttctacataggacttttggattggctttgatgaaacactgttccacaaggaatttcagattagacttttaaagctgagcccagacatgggtttgtatcctctaatacctgtgagttgggttatcctctcctcttgaggtcccaagataaactcagagcttccagacctgttagaaagtgacattcttcactgaccacaggttaggaaccctgtgtggggactgtgtagacaaggtgtgaggccagttctccccaaggggcttttattggctctgcatgtcaagcttgattccttaaagggaaacacaccctttcagttaaagccttggcaaaataaccggtttttccaattgtgttctgttgacaaagaaaaatggattcttgctgcactgatgcgaacaactatattgccgtaagttaagagtacttacagatagtctccaaattttagaggaaccaggcagagaaaaatgaacatgctccaaattttgttcacagtagtataccttacttgattattaaaggccataaatagtttaaaataagtttcctttcccagtccatgcaccaaaatgatacggctctgatgagtggaggaacaacagggttcctggtcctcatgctggtttagataaaatgacacagacacatgtggagtggttttaaggagtggagagtttaataagcaagaaggaagggagaagagagaaggaagacgctcccccttgcagagacggagcgggggttccaaagctgaaagaggaggtcccccacattaacaatttttaaaataccgtacaactgcagaaaatgaggactgcctgtacatactgtttgacactttgtttttttttttaacttatcaactttattttgtttgtttgttttggttttgggtttttgtttgtttgtttgttttggagacgagtctcactctgtcagccaggctggagtgcagtggcacaatcccagctcactgcaacctccacctctcgggttcaagcaattctactgcctcagcctcccgagtagctgggattacaggtattcgccaccacatccagctattggttttggtttttgagacagggtcttgctgtgtcacacaggctggagtgcagtggtgtgatctcagctcactgcaacctctgcctcccaggctcaagtgatcctcccacctcagccttccaagtagctgggactacaggcatgcacaccatgcgcagctaattttttctattttttgtggagacggggtctcactatgttgcttaggttggtcacaaattcacagcctcaagcagtcctcctgcctcaccctcccaaagtgctgggattacaggcatgagccaccacatccagccttaccagctatattgaagtataatttatataacataaaatttgccttttaaaattatacagtgcaatgcattttgacaattgtttacatctgtgtaaccaccatgcaatcaaaatatagaacatttctataaccttcaaaagttccctcatgcccctttgcaatcaattcactacttctccagctccaggcaacaactggtctgcttcctgtcactataaattagtgttgcctctttcagaatttcatctaaatggaatcctataacatatactattttgtatccatcttcttttactccaaagttcttgaaattcattcatgttcctgtgtgtatcagcagcgtgttccatttgattgttgagcagtattgcattgtgtggatatatcacaatgtgttcattcattcaactgttggtggacatttgagttgtgtccagtttagtgctattctgaattaaagtgatgtgaacaatcatgtacaagtatttttgtaggcatattttttttatttctcttggataaataccccaaaacagaattgttttgggggtcatatgaaatgggaagtatatgcttaactttataagaagctgccaaactatttttcaaaatggtaatatcactttacattttcatgagcaatgcataaagcgttccgcttgctacattttctcaccaatgcttcctattgtcaattttttaaattttagcaattctagtgggtgtgtgatactatctcattgaagtttcaactgtttttccctgttgactagagacactgagcaacttttcatgtgttgtctatttgtatatcttcttgaagcattcgttcatctttaactgagctgaacgccttcttaaaattgagctatgggagttttaaaatatatccttgtagctgggcgtgatggcaggtgcctgtaatcccagctactcaggaggctgagacaggagaatcgcttgaacccaggaggcggaggttgcagtgagccgagactgcaccactgcactccagcctgggcaacagagtgagacttcatctaaaaaataataattatacatgtaattatatatgatttttatatatgtaatatatatattcttgatgtgagctctttgtcacatacatattttgtggatattttatcccagactatgacttgtcttttcattttcttagttgtgtcttttgaagagcagaagatgtaattttgataaagcccaatttattttttcttttatagtttgtatttcttatgtcctattcaaaaactccttgcctactgaaaacttatgatgattttctcctatattttcttttagaagttttatagttttaccatttataatttggtctatgaatccttttgagttgatgtttatgtatggtgtatggtgtgaggtaacaatgaagattcatatttttttccaaaggaatatccaattgtctctttggaaaaatatgctgagaaggctatcttttccccaccaaataatcttagcaccttaatcaaaaatcatttggccatggacatatgtaggtgtgggttttttctgggctctctgtgttagatggatagatagacagatacagatatataactgtgtttacacatatgtaactgtaaacacagttatatatctatatatccaccaacagttgaatgagaataaactattgttataagcatatatacacattgtatatatatgtgtacatatacatattgcatatgtatgtatacatatatacacacaaagtatatatatgtatgtatacatatatacacacttaaagtaatggcctccagttcgatccaagttgctgcaaaggacattatttcatgccttttcgtggctgagtaatattccatggtgtatatatatatatgtgtgtgtgtatatatatgtattatgtatatatatatgtgtgtgtgtgtgtgtgtgtgtatatatatatatgtgtatatatatataccacattttctttatccactcattagtcgatggggacttaggttggtttcacatttttgcaattgtgaattgtgctgctataaacatatgtgtccaagtgtctttttcatataattacttattttcctttgggtagatacccaatagtgggattgctggattgaatggtagatctgttttttgctctttagagaatctccatactgttttccatagaggttgtactaatttatattcccagcagcaatgtgtaagtgttctcttttccccacatccacaccaacatctattgttttttgactttttaataatggccattcttgcaggaccaaggtggtagctcgttgtggttttaatttgcattttcctgatgattagcgatgttgagcattttttcatatgtttgtgggccatttgtataccttcttttgagaaatggctatttgtgtcctttgcctactttttaatgggattgtgttttatttttcttggtgatttgttagttccttgtagattctggatactagtcctttgtcagatgtgtactttgcaaagataatattttggatgttatatttccattataatttagttcaaagtattttctaatacaccttgcaatttcttctttgacccatggattattttaaagtttgttattttgtttgtttattttgagacagagtttcactttttttgcccaggctggagtgcagtggcacaatcccggctcccagattcaagcgattctcctgcctcagcctcccaagtagctgggattacaggtgcccaccaccacacccagctaatttttttttcttttttttttgagacagagttttgctcttgttgcccaggctggagtgcaatggcacgatctcggctcactgcaacctctgcctcctgggttccagcaattctcctgcctcaacctcctgagtagctgggattccaggcatatgccaccacgccaggctaattttgtatttttaatagagacggggtttcttcatgttggtcaggcgggtcttgaactcccgacctcaggtgatctgcccgccttggcctcccaaaatgctgggattacaggcatgagccactgcacccagtccaattttttgtatttttagtagagatggggtttcatcatgttggccaggctggtcttgaactcctgacctcaggtgatccgcctgcctcggcctcccaaagtgcagggattacaggtatgagccaccatgaccagcctaaagtgtattgtttagtcaccaaatatgtaagtattacccaaatatatttgtcactgatttctaatttaattgtattgtgatccaaaaatatacattgtatagtttctattcttttaaattcgttaacatttcttttatggcacagaatatggtctatcttggtgagtgttgcttacacacaactgtgtaactgaaaactgtgtattctgcttctcgtggttgttgtatcctataattgtcaactagatcaagttagtaagagtgttgttcagtgatcttttcttcttcagtgtttactgtatttgctaatcccatccagtgaagtttccatttcatatattgtatttttcacttttagaagttccatttgactctttcatttccatcctcaattatcttcatatttttctttaaatttttgagcacatttataatggaggttttaaagtccttgtctgctaattttgtcacctctgtaattcctatgatgattttcttcctggcttggggtcataatttgttgcttatttgcatgtctaataatgtttttattggacagcagacattgtaaatgttatatttttgagtgtttggattttgtctttctttaagaactattgcagtttgttttggaaggctattatgttttttgcagatcaggttgatcttttcaaggcttgtttttaagctttgttaggacaggtctgtagtaacttttgccttgggctaatttagacctaccacttaattctgacttttttgattaatctgagtgttcagcagggtctctttattatggctaaatgaaattcaaacattttccagccctatgtgaccatcaagaattcagctaatagctccctggcagttcttcgcccagctgcagaaaagtgtcagtgcactctatgtatgctcagattattatttagccaaagacttggggatccatattaatattcctggagttctttgtgtagctccattctctttagtactctatcccataaattctggctgcctcaatctcctaatctccccaaactctaatatctattcctcaactcagcaaaaccatggtgttattcttggatttcccctttcctgccccacagtctgaaagttgtctccaggcaaaaaaaatggagatcctagtttgcggatcctcatttccttctccttttttttttttttttttttttttttttgagatggagtctcgctctgtcacccaggctggagtgacgtggcgtgatctcggcttactagaaactccggctcccgggttcatgccattctcctgcctcagcctcccgagtagctgggactacaggtgcctgccaccatgcccggctaattttttgtattttgtttagtagagacggggtttcaccgtgttagccaggatggtctggatgacctcgtgatctgctcacctcggcctccaaaagtgctgggattacaggcatgagccaccgcgcccggcctgcttctcttctcttatgggttagaatcctgcactgtcttttgaacaaatgtctaaaagcttttatcacacattttgatccacttcccagttgttatagtggtatatctggtttcacatgactgaaaggaaaagttttcaccttgctttttgtactaataatatatcctggaaatcattctatataaatttatagaaatcttcatttttaaaatagcttcataaaactccattgtaaaaaccaggtgcagtggctcatgcttgtaatcccacactttgggaggccaaggcgggtggatcacctgaggtcaggagttcaaggccagcctggccaacatggtgaaactccgtctctactaaaaatacaaaaattagctgggtgtggtggtgggcgcctgtagtcccagctacttggaaggctgaggcaggagaattgcttgatttcaggaggcggagattgcagtgagctgagattgcgccactgcactccagcctgggctacagagcgagactccgtctaaaaaaaaaaaaaagcaaaaaaaaaaactccattgtatgtgcacatatcattatctgttcaacccatctatgacttgtcatttaggtagtttccatccaatatttttgcaatataaaaaatgctaatgaagaacctgagatatatatatatctatatatatagatatatatgtttgttgttgttgttgttatttttgaagtatgtacgtataataaattcctaatagtgtgattgctgcatcataaggtaaaggcatatgtagttttgttaaatatagctattccccatcttgcattcctacaaatagatgagaatgtccattgtcccatagtctcctttgcagagtatattgtcaagctttttaattgttgccaacctgatgggtaaaaagatatctccaaataattttaattaaaatttctcttattatgaatgaggttaaatagtttttcatatgtttaaaagccagtttatatctttttgtttttttagagacaggaatcttgttctgttgcccaggccaaattgcagtgatgcagtcatagctcactgtagcctcgcactcctgggctcaagcaatcctcctaccttagcctcccaagtagctaggactacagatggatgccaccatgtccagctaatttttttatttttttgtagagatgtgaggtctcactatgttgcccaggcttgtcttgaactactggcttcaagtgatcctcccacctcagcctcccaaagtgctaagattacagccatgaaccaccacaaatgaccctatatatttttttgaattgtctgttcatgtcttattttcatttttctagtagttttttttttaagtgttttagcctaaatttgtaaaaagtttaggggatatatgaagggactctaaatgtttatgaagaaatttaattaaaagataaaaataaaaatataagctttatttttcaacatgagctccatcaagttcaaggcacttttgtaagcaatgatactagccatttagttcacccctaaagaactgagagtcctgggaatttagccatgtcaatgcagtattttttatattggttactgaagaaaaaatgggtgccctttaaagttgtaagattaggaacaaaaacaagtcagaagaagccaaatcagcactgaaaggtgggcacttaatgattacccaagaaaactctcaccaaattgcccttgcttcatgagaggaatgagcgggagcattgtcgtggtcaggaaggattctggggaagttttcccaggcattttttctgctgaagctttggtaactttctcaaaacactctcataataatcagatcttatcactctttggccctccaggaagtcaaccagcaaaatgctttgaacatcccaaaaaagcgcttgccatgacatttgctcttgaccagtctgcttttgcattggtcaaatgccaccacttccacctcttgtgctttgttttcaggatcagactggtaaagtcatgtttcatctcttgttacagtttttttttttttaagaaacccttcaggatcttgatcacatttgtttaaaatttcaactgaggctgggcccagtggctcatgcctgtaatcccagcactttgggaggccgaggcgggcaaatcacgaggtcaggatttcgagtccatcctggctaacatggtgaaaccccatctctactaaaaatacaaaaaattagccgggcatggtggcaggcacctgtagtcccagctactcgggagggtgaggcaggagaacggcatgaacccaggagacggagcttgcagtgagctgatatcatgccactgcactccagcctgggcaacagagtgagactccagctcaaaaaaaaaatcaagtgaaaactctggtcttaaactgcagctgatctattttatttttattttttttcagacacagccttgctctgttacccaggctggagtgcagtggcaccatcatggctcaatgcagccttggcctcgtgagctcaagcaatcttcccacctcaggctcccaagtagctgggactacaggcacatgctaccatgcctggataatttttttgcagctaatctagatgtaatggttttggcacccatctaatggaaagtttgctcaactttaatttttcagtcagaattgtgtaagctgaaccgagatgtctatggtgttggctattgtttctgctgttaattgtaggtcttctttaattagagcacagacaagatcattttttttcctcccaaattgatgtagatggtcttttgctgtgggcttcatcttcaacattgtctcatcccttcttaaaacaagctagctacttgtaaactgccgttttctttggagcattgtctccataaacttttcacaaaacatcagtgatttcaccgttcttccactcaagcttcatcataaatttgatgtctgttcttgtttccattttagcagaattcatgttactctgataggggctcttttcaaactgttatcttattcttcttagtgcctcaaactagatcctattcagacatggtataacaagttagtatgggtttattttggtgcaagaaatattttgaaatccacacatttttttcataatatgcattttccatgaagtttttgaaaactccttgtattaggaatattagtcctttgtccagtaaacagactgcaaatattttctcacagctcatcatttaccttttggcatttttttgcaatgcaatttttttccctttgtttttgttttttgtgtaatgaatcaatgttttcttttttttttttttttagaccaagtctcactctgtcacacaggctggagtacaatggtgcaatctcagctcactgcaacctctgcctcccaggttcaagtgattctcatctctcagcctcccaagtagctgggattacaggcacatgccaccatgcctggctaatttttgtatttttagtagagatggggtttcaccatgttggccaggctggtctcgaactcttgacctcaagtgatccactcacctcggcctcccacagtgctgggattagagacgtaagccactgcccccggccaaatcaacgttttcttatattgcatttaggttttaagtcatagttagaaagcctttccccacacctaggttatagaaacattcattacttttttcttccagtgctagtacttgcatggtttttggtttccacatttagatccctgatctaattggagtttattcttttgtgtgctgagatatggatctgattatatcttttttcccaaatggctatccagttgtcccaatgccatttattaagcacttcatctttgtcccagtgatttgagatagcatctttatcatgtaccaaacttctatagtgccagaagatttttattttttttagacagggtctggctctgttgcccaggctggagtgtagtggcacaatcccagctcgctgcaacctccgcctcacatgctcaagtgcccgcacctcagcctctcaagtagctgggactacaggcacatgccaccacaccaggctgatttttatatttttttgtagaatgagatttcaccatgttgcccaggctggtctcaaactcctgagctcaagaaatccgcccacctcagcctcccaaaatgctaggattacaagcatgagccaccacacccggctgccagaaaattttaatgatcagaaaaccacaattctttcttcctctgttatatgttgaagtaaaatacttcatttagaaaactaagccgggcacagtggctcacacctgtaatcccagcactttgggaggttgaggcaggcagatcacctgaggttaggagtttgagaccagcctggccaacatggtgaaaccctgtctctgctaaaaatagaaaaatttgctgggcatggtggcgggtgcctgtaattccagctacttgggaggatgaggtaggagaattgcctgaacctgggaggcagaggttgtggtgagccgagaccacgccattgcaccccagcctgggcaacaagagcaacggtaaactccatctcaaaaaaaaaaaaaaaaaaagaaagaaaaaagaaataactcagccatacaaggctacccatttggtgagaactaataataagttagatagcaaggtaatagcaaaatgtgggtgcaaaattaaagcaagttatttctgaggagaatgtaggtctcatggaagattttcatgtggacaaatttagtaaattttttgcaggtagtttcctgacatatttaacatttgtgatatagtaaacaataagaaggtactaaaggctgggcgcggtggctcacgcctgtaatcccagcactttgggaggccgaggtgggcggatcacaaggtcaggagatcaagaccatcctggctaacacggtgaaaccccgtctctactaaaaatataaaaagttagctgggcgtggtggcgggtgcctgtagtcccagctactcgggaggctgaggcaggagaatggcgtgaacccgggaggcggaacttgcagtgagccaagatcaagccactgcactccagcctgggcaacagagcgagactccatctcaaaaataataataataataataaggtactaatatgatccagactagaagagaatagcactaaaatgggagatggggtaaacctgtggttttttttaccttaggcttttgacttccaaaattattgtttttgctgggtgcggtgggtcactcctgtaatcccagcactttgggaggccaaggtgggaggattgcttgagcctaggagtttgagaccattctaggcaacaaagcaagaacctgtctctaaaaaaatttaaaaattagccagaaatggtggcacatgtctgtagtcccagctacttgggaggctgaggcaagaggattgcttgagccttttgaagttgaggcttcagtgagccatgatcaccccactgcactccagcttgggcaacagagcaagaccccatctcaaaaaataaaacaaaatagactgggcacgatggctcacgcctgtaatcccaccactttgggaggctgaggtggatggatcatgaggtaaagagatcgagaccatcctggccaacatggtgaaaccccgtttctactaaaaatataaaacttagctgggcgtggtggtgcacacctgtagtctcagctactcgggaggctgaggcaggagaatcgcttgaacccgggaggtggaggttgcagtgagccaagattgtgccactgcactccagcctggcgacagagtgagactctgtctctaaataaataaataaataaaacaaaataagtaaaataaaataaatgtttgtagttccaaaatattttgatgacataatttcttcttgttctaataaaactacatatgcattggtcctatgacctagtaatcacactattaggaatttatcataaatacacacctcaaaaattacaaaaatacatatataccagcttatttattacagcgttatttgtaattgcaaaaacattgtagatagaatggaggtcacataaaacttattcttaagattcagaccgggtgcaatggctcacgcctgtaatctcggcactttgggaagccgaggcaggcagaccacccgaggtcaggagtttgagaccagcctggccagcatggtgaaaccccatctgtaccaaaaatacaaaaattagctggtcgtcgtggcacgcctgtaatcccagctactcgggatgctgaggcgcgagaactgtttgaaccccggaggcagagactgtagtgatctgagatcatgccactacattccagtctgagcaacagagcaagacttcgtctcaaaaaaaaagatcatagatcatcttatcaaatcaaagtatgcaaaatattcaagtaaacttcagataaatatgaaggctaaaccattcagcttcttcaccaaacccttgaatgtcccacctgtctaaatggagatacatgtttgtttgatttattggttaactgtttttattccatttttcctcaaatgatcccataatttgaccttaggaagctgttcaaatagacacattaggttgaatggaaagactactcgatgatatttaggattttaagaggattttatgtattttttccttgtgtgcaataatttaatagcatcttgaataggattttctgatattactaaccctctgggaataatattaggtaattagacagttagctaatattaaaatatgtatcaggtaatatttattgagagtttcctctgtgccaagcaggatcaacttcataggcaggcgacctgtgcggggacacagggcttcatgcttagataggcccccttgctttgaaggcccctaccctttggttagggctctgctgttaccatcttgaaattcttaataatttttattttatttttttgagtcagggtcttgctctgtcgccctggctggagtgcagtggactcactacagtcttgaattcctgggctcaagcaatcctcccacttcagccttctgagtagttaggacgacaaacacacgccaccatgctcagataagttttttgtttgtttgtttttttgtttttgtttttgttttttgtagagatgggactgtccctatgttgctcaggctggtctcaaattcctggcctcaagtgatcctcccacctcagcctcccaaagtgctgggactacaggcatgagccactgtgcctggtcaatcatttttattaacaagcccaagccctcttttttttttttttttttttgagacagggtctccctctgttgtccaggctagagtgcagtggtgcgatcttaccttcactgcaacctctgcctcctgggttcaagtgattctcctggctcagcctccctagtagctggaattacaggcacccacccccatgcctggcaatttttttgtatttttagtagagatggggtttcaccatgttggcaaggctggtctcaaactcctgacctcaagtgatccacccaactcggcctcccaaagtgctgggattacaggtatgatccactgcgcccggcctccaagccccctatttttattttgcactgaccctacaagttacgtagctaggcttagttatgtttttagcaaggaaagtgtataatctcatgtaccttttgaaagattactcaggtctctgcatgtgaaatggaatttagggaatgcaagagagggagtaaaaataacagcgaggaagctatgatagcatttaaggttgctttgactcaggggtagcagtagatagggtaagtaattgatagtttcaaaatatattttgggagtagtaagcattggtatggattagtaatatactggatgtggggatgcagaaaaaaatattaaaaattacttctgaaattctggctggaatagaagtgccacttaccaggtaaggaaggttggagacataacatatttgagggtgtggtcaaaagatgagtttgacattatgctatgtcatataaaagacatataaaagactacctattttataattcctttttaataaaatattcagaaaaagcaaaactgtggttgcctgaggctgaagctaggaagattgactacagacaagcatgagggaaattttgggggtgatgagagttttctaaaactggattgtggggttggttgcattactgtataaatttattaaaaatccctgcatcgtataggggcactatattgtatgtagaaagctgtgaaaagattttaaaaatgattgacatgtctgtggttatatcaatgagtactattattattcccattttatacataaagaaaataaaagagaagttaaaaataaaagtttcatggttacatagctactaggtgtaatatccagtattggaatttgaatctttttgacactaagaccttactctcgatcatataatacattcactttctattttaaagttatattatagccgggcacagtggctcacacctgtaatcccagcactttgggaagccgaggcaggcagatcacgaggttgggagatcgagaccatcctggctaacacggtgaaaccccgtctccactaaaaatagaaaaaattagccaggcgtggtggcacgcacctgtatcccagctactagggaggctgaggcaggagaatcgcttgaacccagaaggcagagcttgcagtgagacgagatcgtgccactgcactccagcctgggtgacagagtgagacaccatctcaagaaaaaaaaaattatattataaatgctgcatctcattggtcagaagctctcttgaaattataaaacaaagaagaaaaaagataaagactgggaaattgtgttgaatcagtatataaatcctgtatactggtccttccatttcccctagaaataagtgatacaggccaggcgctgtggctcacacctgtaatcccagcactttgggaggcggaggctggcagatcacctgaggttgggagttcaagatcagcctgaccaacatggagaaacccccgtctctactaaaaatagaaaattagctgggcatggtggcacatgcctgtattcccagctactcgggaggctgaggcaggagaattgcttgaacccaagaggaggaggttgtggtgagccaagattatgccattgcactccagcctggggaacaagagtgaaactcaaaaaaaaaaaaaaaaagaaagaaaaagaaaaagaaagaaggaaggaaggaaggaaagaaagaaagaagtgatacaacaagttacagcatctttgtttattatccactgtgagttgtattaccacactttacttggctctttggcaaactatattatctcttcagatcactagggctaggaaggcccactggtaacttgaaggagtaaatgtatcttctaaaaaatgcttacttccagggagattggatccacacaagtgaatacatatatagtccttagtgtatgctatgattattttactatgtcagtagcataaagattgctatattaataagcattaagtgcctgctgtgctagacagtgaggatgcaagtggccaccaaaatagcatggtccctgccctcctggagcttctttttttcttcttcagtgggggaagcagatactttgcttatgcaaaaataattataaaatttaaagttgtgccaagttcaatggaaaaaatataaggtgttctgagagagcataacaaaggatcctggttttaactggggcctaatggaagacctctattaggaaataacatttaaactaagaccagacagacctgtagaaattagcaaagcaaagggagggaggaaaaagcagctttcctggcaaaggaacaatttgtgtgaaggccctgagacagggaagggctggggttctgaccaccctccaagtggtgcaatggaatatagtgagagagggagaagacatgagaacttggatactatgcaaaggatttggtattttaattcaagagcagtatgatgctactgaggagcagctggacaattgtgtgatccaattaaaattttaggaagatgaacctcgctattgtggagaatgcatacacaagggttctgttggttcatgaagaggtcttaagaaaactatgagctgggtgcagtagctcaggcctgtagtcccatctacttagaagtctgaggcgggaggatcccttgagcccaaggagctggaagttacagtgagctatgattattccactgtactccagcctggatgacagagcgagatcctgcctcagaaacaaaaaccaaaaaacaaacaacaacaaaaacaacaacaacgaaaatctcagaaaactacaggccttattatcaagaaaatgacaggccttattattgagaaaactacttacatttttaaaagctgattttcaaaaaccagattgtgaattaagtgatgctgaataggggaaaaaaagactgataaaccagtgtatctctgaataacccactagatcagtgcttgtcaaactttaatgtgttttcaaatcaccctgatgttttgttaaaatgtaagtcatgtctcagtaggtctagaggagggcatttctgcatttctaacaagctccccggtgatgcctagaccattggtcctcacactttgagtagcaagtgattgggctatactctttattctaaattctaaatgtattctatcttctaatgcctatcagccctcttgctggtctggctaattatcaaacttgagcatttaaaactgggggttttcagagattaattgaagtgttaaagacatggaaatataggtcacatatggcttttcatctcttccggaaatatcctatatatccttacttcttttctacctacctaacctatgtgcctaccccttcacttatgttcaaggttctattatacttcaaaaggactctatgcaatcaaagtgatgtccaagacaaatatacagaaatagtatgaggctctaacactttacatctaatggagtggtttgcatcattaattgaggcttactctgtgccaggcactttacctgccttcttcatttaataggataggagcaggaactcttagaggttcatttcttgttcaaggatatacatctcatctctggcttatatcacagtggactcttttattcactatcctaatcattataattttgtttggtgacaacaattctaaatgcagaaaagttaaggctctttattctgtgactaaaggctttgtattttctaaagatttgtggagctttgctgccattatttcaataattttataaagatcctaggtggtaaataggcctggctttttttctttttgaaatcttctccgtcttcttcttcattagcagtgcaacttcttgtggcatatggtacccaagatcttgggaaaaggattgatcaagtaaagggaaacgatagagagagtgtgctctacaactgagatcatgctccttgtgaaagacagggtagggaaatttcttattgctccctggttcttaagaaatgagagctaacaatgacatccagttttaaaagaaataaaatctgaattgtacttttaaattttataagccagagttaaaccaatagattgtaactcctgctaatttgatagtagctccagataatgaggaagtgacagggaatgctaatttcatttggtaagagataaaactgaaattattaatgtctccacggaaatgctaaatgcctccttacaagtagggtccggctaattgtctgtcttccaacaagccagatttgttggtgtttttccagacaatgttgtgtagttttcggtttggttcgatcccctttcttgtgatcaaagaaagtgattcaaatgtttaatgagtcttgatttggattggagacttgcagaacggctagcctcacagccccaaggctggctttccctaaggtaggtttcctatgcaccgatactggcaaggcgctttggctggaaactctggaaggaagccaaaggaaagtgaagttcctggcgctagcgcgtgtcctgctcagagagcccggcgctagctcattcttcgtgcagttattggctgggactctgtgtgccgctgtcggccaatgaagacgctggagatcgggcccctgcccgtcccctttctgcgccccgggatgaggcagagactgaacagccggcgagcaaatcaacggcatccagaaagccatgtcggactcggcgcccagcgcccaagcgctaacccgctgaaagtttctcagcgaaatctcagggacgatctggaccccgctgagaggaactgcttttgagtgagatggtcccagaggcctggaggagcggactggtaagcaccgggagggtagtgggagttttgcttctgcttggtgccttgaacaaggcttccacggtcattcactatgagatcccggaggaaagagagaagggtttcgctgtgggcaacgtggtcgcgaaccttggtttggatctcggtagcctctcagcccgcaggttccgggtggtgtctggagctagccgaagattctttgaggtgaaccgggagaccggagagatgtttgtgaacgaccgtctggatcgagaggagctgtgtgggacactgccctcttgcactgtaactctggagttggtagtggagaacccgctggagctgttcagcgtggaagtggtgatccaggacatcaacgacaacaatcctgctttccctacccaggaaatgaaattggagattagcgaggccgtggctccggggacgcgctttccgctcgagagcgcgcacgatcccgatgtgggaagcaactctttacaaacctatgagctgagccgaaatgaatactttgcgcttcgcgtgcagacgcgggaggacagcaccaagtacgcggagctggtgttggagcgcgccctggaccgagaacgggagcctagtctccagttagtgctgacggcgttggacggagggaccccagctctctccgccagcctgcctattcacatcaaggtgctggacgcgaatgacaatgcgcctgtcttcaaccagtccttgtaccgggcgcgcgtcctggaggatgcaccctccggcacgcgcgtggtacaagtccttgcaacggatctggatgaaggccccaacggtgaaattatttactccttcggcagccacaaccgcgccggcgtgcggcaactattcgccttagaccttgtaaccgggatgctgacaatcaagggtcggctggacttcgaggacaccaaactccatgagatttacatccaggccaaagacaagggcgccaatcccgaaggagcacattgcaaagtgttggtggaggttgtggatgtgaatgacaacgccccggagatcacagtcacctccgtgtacagcccagtacccgaggatgcccctctggggactgtcatcgctttgctcagtgtgactgacctggatgctggcgagaacgggctggtgacctgcgaagttccaccgggtctccctttcagccttacttcttccctcaagaattacttcactttgaaaaccagtgcagacctggatcgggagactgtgccagaatacaacctcagcatcaccgcccgagacgccggaaccccttccctctcagcccttacaatagtgcgtgttcaagtgtccgacatcaatgacaaccctccacaatcttctcaatcttcctacgacgtttacattgaagaaaacaacctccccggggctccaatactaaacctaagtgtctgggaccccgacgccccgcagaatgctcggctttctttctttctcttggagcaaggagctgaaaccgggctagtgggtcgctatttcacaataaatcgtgacaatggcatagtgtcatccttagtgcccctagactatgaggatcggcgggaatttgaattaacagctcatatcagcgatgggggcaccccggtcctagccaccaacatcagcgtgaacatatttgtcactgatcgcaatgacaatgccccccaggtcctatatcctcggccaggtgggagctcggtggagatgctgcctcgaggtacctcagctggccacctagtgtcacgggtggtaggctgggacgcggatgcagggcacaatgcctggctctcctacagtctcttgggatcccctaaccagagcctttttgccatagggctgcacactggtcaaatcagtactgcccgtccagtccaagacacagattcacccaggcagactctcacggtcttgatcaaagacaatggggagccttcgctctccaccactgctaccctcactgtgtcagtaaccgaggactctcctgaagcccgagccgagttcccctctggctctgccccccgggagcagaaaaaaaatctcaccttttatctacttctttctctaatcctggtttctgtggggtttgtggtcacagtgttcggagtaatcatattcaaagtttacaagtggaagcagtctagagacctataccgagccccggtgagctcactgtaccgaacaccagggccctccttgcacgcggacgccgtgcggggaggcctgatgtcgccgcacctttaccatcaggtgtatctcaccacggactcccgccgcagcgacccgctgctgaagaaacctggtgcagccagtccactggccagccgccagaacacgctgcggagctgtgatccggtgttctataggcaggtgttgggtgcagagagcgcccctcccggacaggtaaggtttagcaagtcatgcttgaccctgttagtgcttttttattcctacatcatattgaggaaggaatggagctgtttttttagtgatgaagatgttttcctggtgatgcattcacactttcaactggcccttcctagatcaaagttagtgcctttgtgagatggtggcctgccagagtgtggtttgtggtcccatttcagggggaagatacttgactcatctgtggacctaattcacatcctcagcactcttttgctatcacaactaaccaatcttgctaagggatggttaagctaaaacacaagatctcagcgatcagagtttagcttggtatcatttacattaggaataagctgctggatacctctaaccagtggcagcttctaggaatacaaaaactacctcattcctccacctttcaagtgattgtgacatttgtattaaaactaatagctttttgataattttcctttgtttatacagatcgtgtacctcattctcagataattttttatgaatgaaatgaaattccaggcatcctttaaattttatttcaagcattctactggaaatgatgtgcaccctgcttacaaaatatttttaccttataacagtaatgcatgtttgctagaaaattcagaaaatacagaaaagtatttaaaaaattaaaactataatctccaaacccaaagataaccatttttaattataaaagtaataatttatttcaaaaataaatctaggcaacccaagaaaacataaagtagccagactcagtggtgtgcacctgtagttcttgctgctcagtgcctgaggtgggaggattgcttgagcccaggagttctgggctgtggtgcactatgctgatcaattgatcaatccactgtctgcactaagttcagcatgaatacagtgacctcttgggagggcaggaccatcaggttgcctaaagaggggtgaactggcccaggttggaagtggagaaggtcaaaactgctgtgctatccagtagtgggatgacatctgtgaatagccactgcactccagcctaggcaatatagggaaaccatgtctctttaacaataacaacaacaacaacaacaatcccagaaactacaaaaggagagtctttttggtgcctccagtgttagtccctgtccttccagccttatttttcttaagtatatgcacaatgtgaaaggtagataaattcatatccttagacaggtaaagcattcattaattcagggtggtatgcaaggatactatccaaggcatggtatccatgcaaggtgactgcaaggcctttgccctggagagaaccctatacatactctcaactgtaggagaaacactgttattttgttactcagtgcatcattgctatcaactcttggatttggcagttagtcaaatgaggttctaccatttaccaactaggagtctgtggccaagttactcaatctcctttctaagcctcttcctcatatgcaaaaagggaataataagtgttttataagattcatgcatgatataatgtatgcaaagtgtttagcatggtgcctggcatatcataactgttaaacaattattagccagctcctagcattttgggaggctgaggcaggcggattgcttgaggccagcagttcaagaccagcctgagcgacatagtgagatcctgtctctacaaaaaaaaaaaaaaatgtgttttcattagctgggtgtgttggcatgcacctgtggtaccagctacttgggaggctgaagtgggagaattgcttgagcctgggaggttgaagctacagtcagctgtgattgcaccactacacttcaaccatggcaatagagtgagaccctgtctcaaaaaaaaaaattatcagctattactataattatttttattagttcctcactcacctaaaatctcaaacacaccttagaaatacacatatgagaacaaccaaaaatgacaaagtagaagcacatatgaaaaggctaagaaagcatgaaagccagcaagaaataactgccgctcttctggtcagcctggaaagcaactggcattttccctagaacaatgttttcaaacttggttgcacattaaaatcacctagagaccttttaaaaattctgaaacccaggccacaccccgacaaatgaaagcacagtctctgggggtgggacataggcatcattttttgaaggtccccacttgatcctaatgtgcagacaaatttgaaaaccacagctttgggaggctgaggtgggtggatcataagatcaggagtttgagaccagcctggccaatatggtgaaaccccgtctctactaaaaatgcaaacattagctgggcatggtggcgcatacctgtagtcccagctactctagaggctgaggcggaagcatcagtgagggagaatcagtgaacccaggatgtggaagtttcagtgagcccagatcacaccactgcactccagcctgggcgacagagcgagactccacctcaaaaacaaaaagaaagaaagaaaaaagaaaagcagtactctggaacctaccaatccatcatttagcatatttgtgaagtaaagtgttattctggtatttgcagaaccagaatccagctttattgggccaggcccaatttttttaaaaaacatggtaaggtctcccagccttaaagtattacatagcatagctctaaaagatcactgtaggaagacataaaatggtatttcagtcatctaagggaaaaaccttcctaaagcactagcccctggacaactattatttaaacatctacagctgttcaatagatattgggttctttttggagggatgtgacaaaattcttgtataattagattgtgatgatgattgtatcagtttagtacatgtaaatacactgaaaaccattggattatacactttaaatatgtgatttgcatggtatgtgaattatgtctcagtaaaaatctagagatggggctgggctcagtggctcacgcctgtaatcccagtacttagggaggctgaggccagcggatcacctgaggccaggagttcaagaccggcctggccaacatggtgaaacttcatctctactaataatacaaaaatcaggccgggcctggtggctcacgcctgtaatcccagcactttgggaggcggaggcgggcggatcacgaggtcaggagtccaagaccagcctggccaacatggtgaaaccccgtctctactaaaaatacaaaaattcaccaggcgtggtggctgaggcaggagaatcgcttgatggtggaggttgcagtgagccgagatcgcgccactgcactccagcctgggtgaaagagcgaaactccatctcaaaaaaaaaaaaaaaaaaaaaatcagccagatgtggtggcaggtgcctgtagtcacagctacttgggaggttgaagcaggagaatcgctttatctcaggaagcagaggttgcagtgagccaagatcatgctgttgcattccagcctgggcaacaagaacaaaactcactccatctcaaaaaaaaaaaaaaaatatctagagatgggagaatcatatggctggcataaaaaggtcaagtcaaagatatgtaagattaaggctttacgatgctccagttctagtaaaacagaccaggtacttgttttggtgtgaaattgccaatataagtatagtactgtacatattagttgtttagcttaggtaagtcttttaatctctttaaactccagtttcctcatctataaaataaagagaatatctactttgcaaacttgttgtgagagtgaaaagtaatgcatataaagtccctgtatggagcaagtactcaataactatttgttgaactaaaaatgataatactgatattcaccatttattagcatccctatgtgccagacactgtaaacaattaaaagttatcattctggtacccagagtacagtatgagacagacatgcaaaaaaaaaaaaaaaaaaagataatggagatctgcatagcataagatgcagtgggaccaaacgggaaaaaacacctaaatgagcctggagaaaggaagaaatgatagaggtggtgatgcttgagctatgatctaaaggttgagtagtagcttgtcagacagtaaaggggaaaggacagggcagggaggggccattgcaagaaattccatgcagagggattatggtatttcattatcactgaaccttaaactgtgtgtgtggccgggtacggtggctcatgcctgtaatcctagcactttgggaggccaaggtgggcagatcacttgaggtcaggagtttgaaaccagcctggccaacatggtgaaacctcatctctattaaaaatacaaaaaattagccaggtgtggttgtgggtgcctgtaattccagctacttgagcagctacttgagaggtcgaggcaggagaattgcttgaacccgggaggcagaggttgcaatgagctggtgtcaggccactgcactccagcatgggcaacagagagagactccatctcaaaaaaaaagtgtgcgtgtaaaacagacagtctttgtaggagatgaggtgaagcaagtaggcaggagttagatcctgagttacctttgggccaagccaaggagtttttattttattccatatagatgacagtcactgcagaaatttgaactgatatgcatatatcatgaggtttttttgttttagaaatattattctgtcagtcataagtgaagggactggggacattgggactggaggcaaagagatcttatctctttgcaatagtttgaaagctattgcaatatttgaagagaagattgataaatgcttgaaccagcacagtggcagtacagatggagggagctgactacaataaaatcatcaggacttgttgattgacatgatataggaagtgagggacagggatgagtcaaggctgatccccctagatcctgactaaggaagctgggtggttgacagtgccattcacagagacagtgaattctggcataaacacctaataggtcaggctggtttacacctccatcattcccatgggagaaggtatagaggggtgtgtgtttgtgtgtgtgtgtgtgtgtgtaaaagaacacagaaagccagattcctctttttgacaccagaatattggttcccaccatagtcaaaaggatattcctgaggatcgaggcttggaaaaatattggggaaggataagaactccagttgttgctgctttttttggcagccagtgtaacctaggtaaggacttggttgaattaagaaatttcatgtccagatcaggatggatttttctatttctctgagctctggtgtgtttcccactcagattgcaggtcgtaggtacctacggtgtgaattgtgttgtgtttctgtgcttgtgcaagggagtagctaggttgctgggaggtctggatgagggtgggggtggggtgagatcaagtctccagctccaagaggtcccctggggctaagtgaaaagcttgctcttttgaaatggtcttcgttggtaattaacaaaagatcaagaataccttggtgtcagataaagggaatttgtaggcacaatgctgttggtagctgatctcaatcattcaaggaagctattaaatctatgaacattagcattctgccaggtaaagagatctggtccttagcacctcccagacacactgattctttactgttttgaaacatctccctctcctggcttcctccaccccgcttccatactgtccttgaaatcaatgaatggtaatttagtgtatctagtgtatcactagcaaatgtctgaataagaaaggtttggtttccgctgtgtctcctgttacaatgagaacatgtactgcataaatttaattggctacgttaatgtgtaagccttttctgcaaagagatggatccgtttctgaatattctgcagaagggcagagttttgagtatatggcagtggttctaattagcagttgctccaatacaatcagactgagacggaagctactcatttagaatactggttgatgacaacactggcttgaacaaagtgaccactctccaatggctactctccctctcagtgggccgcaggttgctagggctcaggctgtggctgttttccccgccgaaaaggggcggggtcagtcggtgtgttaggaaaaaaaatgtatatatatatatatgttgtctgcctccccacagagataacaacccgtggaaaaacatgccgttgagcgggaggaaggcgaaaagataggctgggttttttggggggtgggggagcgtggaggatagggtgggctttttcccctccaatgctgcgacgcattaaccctgctgctgttgggacgttctctgctcagcctattggctgagcccgggagccgctgtctgccaatcgggtggtgaaaggcagacaaatctaccccgccaccagcaaaaacggcgcgtaacccttgcggcgccggccgaaccgcgccagagctggcgcggggaaagggagataggtgtctccagctgctgtggctgtttggggcgggtcggcttcatccgcgtctcaggagcaagtagagaattagcgggcggcagcaatgctccgcaaggtgagaagctggacagaaatctggcggtgggctacccttttgttcctcttttaccacctgggttacgtttgtgggcagatccgctacccggtcccagaggagtcacaggaagggacttttgtagggaatgtcgctcaagatttcctgctggatacggacagtctgtcagctcgcaggctgcaggtcgctggagaggtgaaccaaagacacttccgtgtggatttggacagcggagccctgctcatcaagaacccaatcgaccgagaggcactgtgtgggctcagtgccagctgcatcgtgcccctggagtttgtcaccgaaggtcctttggaaatgtaccgagcagaggtagagatcgtagatgtgaatgatcacgccccccgttttccgcggcagcagctggacttggaaattggggaggcagctcctccaggacagcgtttcccgttggaaaaggctcaggatgcagatgtggggagcaattcgattagcagctataggctgagctccaatgaacactttgcactggatgtgaagaagcgcagcgacggcagcctggtcccagagctgctcctggagaagcctttggatcgagagaagcaatcggactaccgcctggtgctgactgctgtcgatggagggaacccgccgagatctggcaccgcagagctccgggtatccgtgctggacgtaaacgacaacgccccagccttccagcaatccagctacaggattagtgtgttggagagcgcaccagcgggcatggtgctcatccagctcaatgcctcagacccggacctgggtcccagtggtaacgtcaccttttatttcagtggtcatacccctgatcgtgtaagaaacctctttagcctgcaccccactactggaaagcttactcttttggggcccctagactttgagagtgagaattactatgaatttgatgtgcgggctcgcgatgggggttctccagccatggagcaacattgcagccttcgagtggatctgctggacgtaaatgacaatgccccttacatcacagtgacctcagagcttggaaccctccccgagagtgcagaacctggcactgtggtggcacttatcagtgtgcaggatccagactcagggtcaaacggagatgtgagcctccgcattcctgaccacttgccatttgccctcaagtctgccttcaggaaccagttctccctggtgactgctggacccttggatcgagaggccaaatctagctatgacatcatggtcactgcttctgatgctgggaaccctcctctcagtacccacagaactattttcctcaatatttcagatgtgaatgataatccaccctctttctttcagaggtcacatgaggtgtttgttcctgagaacaatcgcccaggggacctgctttgctcccttgcagcctctgacccagactctggcttgaatgcgcttatctcctactcactcctggagcccaggaatcgagatgtatcagcttcctctttcatctctctgaacccccagacaggagctgttcatgctactcgatcctttgactatgagcaaacccagacactgcagtttgaggtgcaggcccgggatcggggcaacccaccccttagcagcactgtaacagttcgtctatttgtgctggacctcaatgacaatgctccagctgtgctccgtcctcgggcccggcctggttccttatgtccccaagcactgcctccatcagttggtgctggccacctaatcacaaaggtgactgctgtggacttggattcaggttacaatgcttgggtttcctatcagctcctggaggccccagatcccagcctgtttgcagtctctcgatatgctggggaggtgcggacggctgttcctatcccagctgacctcccaccacagaagctggtcattgtggtaaaggatagtggtagtccaccactctctacctctgttactctcttagtgtccttagaggaagacactcatccagttgtcccagatcttcgagaatcttcagctccaagggaaggagaatctcgtctaaccctctacttggctgtgtccctagtggcaatttgctttgtctcctttggctcattcgtggcactactctctaagtgtcttcgtggggcagcctgtggagtcacatgctttcctgctggcacctgtgcctgtctcaccagatctcgaaggagggaggggcttcccccttccaatgggatcctccgaatccagctagggtcagatgaccctatcaagtttgttgatgtgggaggccactctcatggctgtacacccttggcttctgcacccactcggagtgatagcttcatgatggtgaagtcacccagtgcacctatggcaggggagcctgttcgcccaagctgcccaccctctgatcttctctatgggctagaggtgagacctttgcaggctcaacaaatgcttgagggttattctgatccaggcatatggctaggccatgtcctagagagtactggcctctcagtaagtgcccatagtgatgtcaccatttttgtaagaggtaactatgtggtagacgctgtgctttgtaactgtttcgtgaattaaccagagttgtcacagtttagcattgggggcgggtcatgcctatatctgagtaagaaatgaaagtaattggtgatcaagagccaggctgttgtggaagcatgatgatggaatgtgggagcacaggaggctacagtgcacagggtacagtgcaccaggcagtcacttggacaaaggtggctgttttctctactcttcctgaaagaggggatcagattctgaagtaccttaactctaggttaccatttcccaagggattgaggggaaataaaatctttgtctcccagtatctagtacactgtgaagggacctctctatttgaaacatagagacagcagaaagaggagagaactaaaggaatagagaggcacgcatcagagtggtggcatagatcttttggtctgggtcttaggactcatatcaagtccctactggggatttgaactagatgcggtaaattggaaggttggggcgggttggtcatcacctttggaaaaaacagtaagtgaaatcacttatgtcagaaaactggtttacagttggctgattcatagaaacagccaccctgtgcatctttaagttgagttctcctgaatttggtgaaaccatgaaacctagaagccaagccatccatgcttggcctctgaccaccctcctgggtgacctgattcagccccagaaatgttcccctacccaaaaactgtaacactcattccacatttggggtctggggtgtcagaaaagctaagtcccatgtcagctgacattgagatttccgcaaagcattgctggagagtcagggcaagactttacaaggttcttactaatcttttctctcaccttagcagcattcagcaggatgggggagggtgggggaatacatgggctttgcctctcccagaaggacaagattttgctggttcaagcaaagtggtggaagcttctgaagtcatgcaggaagttgctgggacagaacgctgaggagttttgtatcactttgtcttccctgttgagtaccatctgagctgtcaaactttgctgccaagggggctgaatcaacctgcagcacgaagtgagtggggaggtaggaagcttctgtgacacagatttgcagcctgtgttcccaaggtttccaggattgaggaaactccataattggttgagagcacacagactttttggccaatcagactcagagctgaggtgggagatctgctcttccagcccgcctctcctcctccagctccccagctccactcaaattcagctcccctcccccctgcccacccccgccactcggtgactaagaactgctgcaagcaggcaaacctccgagcagtttttaagaggctggaaggagacataagagacttcagctgctgcattccaagccctgggtctaccttggagacaggacagcacagacttactctccacaaagggacttctgggtcatggggcccaagacactcccacagctcgctgggaaatggcaagtgctgtgcatgttgtccttgtgctgctggggctgggtgtctgggcagcttcgttactcagtggtggaggagtctgagccggggacgctggtggggaatgttgctcaggatctgggcttaaagatgacagatctgttgagccggcggctgcaattgggctctgaggagaatgggcgctatttttccctgagcttgatgagtggtgccctggcagtgaatcaaaagattgaccgagaaagcctatgtggagccagcaccagctgcctgctgccagtgcaggtggtgactgaacaccccctggagctaatccgtgtagaggtagagatcctggatctcaatgacaactctcctagctttgccacccctgagcgagagatgcgcatctcagaatcagcagcatctggggcacgattcccactggacagtgcccaggatccggatgtgggcaccaatactgtgagcttttacactctaagccccaacagccacttctctctgaatgtgaagaccctaaaagatgggaagccattcccagagctggtgctagagcagcagctggatcgtgaagcccaggcaagacatcagctggtgcttactgctgtggatggggggaccccagcccgctcagggaccacccttatctctgtcatcgtgctggacatcaatgataatgctccaaccttccaatcctcagttctacgtgtgggaatcccagagaatgcacccattggtactctgctgctccgcctcaatgccactgatccagacgagggcaccaacggccaactagactattcttttggagaccacacatctgaggcagtgcggaacctctttggcctagaccctagcagtggggcaatccatgtgttgggtcccatagactttgaggagtcacgtttctatgaaattcatgcaagagcccgtgaccagggacagcctgccatggagggccactgtgtgattcaagtggatgtgggggatgtcaatgacaatgccccagaggtgctattggcctctttggccaaccctgtcctagagagcacaccagtgggcacagtagtggggttgtttaatgtgcgagaccgggactcaggtagaaatggtgaagtgagccttgatatctctccggacctgccatttcagattaagccttctgagaaccactactcgctgctaaccagccagcctttggaccgggaggccacatcccactatatcatcgagctgctggccagcgatgctggttcaccttccctacacaaacatctcaccatcaggctcaacatttcagatgtcaatgacaatgcaccccgcttcaaccagcagctttacactgcttacatcctagaaaaccggcctccgggctcccttctttgcactgtggctgcctcagatccagacactggggataatgcccgcctcacctactccattgtaggaaatcaggttcagggagccccagcctcctcctttgtgtatgtcaacccagaggatggacggatctttgcccagcgtacctttgactatgaattgctgcagatgctgcagattgtggtgggggttcgagactccggctctcccccattgcatgccaacacatctctgcatgtgtttgtcctagacgagaatgataatgccccagctgtgctgcacccacggccagactgggaacactcagccccccagcgtctccctcgctctgctcctcctggctccttggtcaccaaggtgacagccgtggatgctgatgcaggccacaatgcgtggctctcctactcactgttgccacagtccacagccccaggactgttcctcgtgtctacacacactggtgaggtgcgcacagcccgggccttactggaggatgactctgacacccagcaggtggtggtcctggtgagggacaatggtgacccttcactctcctccacagccacagtgctgctggttctggaggatgaggaccctgaggaaatgcccaaatccagtgacttcctcatacaccctcctgagcgttcagaccttaccctttacctcattgtggctctagcgaccgtcagtctcttatccctagtcaccttcacctttctgtcagcgaagtgccttcagggaaacgcagacggggacgggggtggagggcagtgctgcaggcgccaggactcaccctccccggacttctataagcagtccagccccaacctgcaggtgagctcggacggcacgctcaagtacatggaggtgacgctgcggcccacagactcgcagagccactgctacaggacgtgcttttcaccggcctcggacggcagtgacttcacttttctaagacccctcagcgttcagcagcccacagctctggcgctggagcctgacgccatccggtcccgctctaatacgctgcgggagcggagccaggtgaggggctcggcgccgccccgggcgacccctgggggcggcactggagaagccgcccgtcctcataagggattgaacttgcatccactcctctccggccggcttggtcgctggctgcgctccacccgattctcgggatcattggaccgtttgcgcgaaaccagagtggccgattaagggatggggctccgagcaccgggggtggtggcgactgtgggcgaggggaggtgggaccgacccccacccctacactcaaaaaaggccggggcctccttcgagcttccggtgaatttcgggcgatttccgcgggtgtcgggggtcccgggaggaggcagtcacagatccacccctgcagccagcctcctaggcgccggctccggcacgcttcgccggtctgtagatttcctcttcgatttctccccagctcccagcatctgtgacttcactgttaccctccctatccccgcatcacccaaccgcacctgtctgcgggacttaggtgtgcgcgcggggctcatgcgtgtcctccctgctggccacccccacggcccacacaagttgcacgggctcgccacgccccgccaacacgtgcgcggacgcacgcacgcactcctcgcacgtgggcttacgcgaataccagctttcactgccactcgctcgcggccagattcacaggcctgttccggtccactcgcagctcccctctgccgctccctccgccgggctcaggagtactcgtagctgattgtgcgcgcctgagggtcccagatcgcggccgcccaggaccaggcgaggactccggagcctcctctcacctctcccacctgcgccccgggctgggccgggtcgcctggggggcggcctgagcgaggcgcggggccaggagcgctggagcgactgccgctctaagtgccgggcgggcaggactctacgatccttgggccagaggtccggatggtcccgggactccgtctcaagggtcggcgacccctcaacccagaagcctcgagcaggcggacaggcagagctgcccagtggccgaggcgcggcagggctccgcgttgggcgagtgagtgagcctctataggacagcaggactgggactccagtggcaccagcggccccttcctcccgcaggaagtgaaagcctcgagcgccctggctctcaacccccagagatacaggcttttggcgccgtcgtgatcacaatgtgcccagcgatctagggtcagagatttggaggtgaccaaactatctgacactctaacaagtcctgtctcctctggcagatggaaagctataggctctgccagatgccagggtgcccttatgtgtgaggaaactacaatagtaaaaaacacaagtttctccaactccaggagcttttattcaaaatatatcaatgcctaactctgctcctaggactgtattttgaaacacccccaggtgattttgatagctgattgagagaaacttactatataactcctttgagaacctcatctcatttgctcttcccaccattgctgttggctaggtactaacatgcctctcttataacagcttcacagaggtcaagtgacttgctcaagttcacagagcaagtaagagagattctaacccctgtctaactccagaatgtgtgcttttaatttcttggcacttggaactttaaaagcttgaggacaggagaggggagttgcctctgctgggattttgcttctgctgggatggggcaagggtggggttccttcccttttaggaccttacatgtggggaaagtcttctgtggctcctcatttctgagcagtccccgcagcgcaaacttggccagttatccttttggagattgagttcccccagctccgtttcctcctatcacaatcactgcatttccatgtagattctgctgtgtctaagaatacagtggctgagggctggccatccctgtgcccttctccatggcagccccagaatggtgctggtgactcccgatacacctggaatgctaggtttctgggttctgctcatatcactgccacctgtgagccttgagtgagccactggcagttccggagcttccttctccctggagtaatctgagatactcacactctctgcttctgggagcaagtatgagtattaattaccagcccaccccagaaccagtgaggaggtggctctaggagtgctccatgagagtgtgtgatgggataacacaccccctggaaagaccagaagggactcaggaatgaagtggctggccagagccccacaccttcagctaggtgggagatggctacacatcagccccttgggagccctggagacttagttggccctgcttggaggctgtgggagctggatccctccccgctgcatcccttccatttttctccgtctcagacagagcagccttgttctcttctccttagtcacagaccattgtctggcacggagttctaggggtgagaagtgtcccgggacttggatgccccgcaaaggcccaatctggcatgactcctaaattaataatgtatttagctgtgggaagagattcttgcaagccaagggcccagagaagatgtccctgtgaatgtgtcactgcacaacctggcaccaaaagggttaccaagaacagcagccatcttgctgcagaggatgctttgttcccagctgaggagttgaataaattcattctagggctggtagaattctcattgaaaagcctcctttgccactttagggggctttgtctgcacctcttcccccagttccacagaagatgccttcagtccttgaattttggctcaggagttctgactctgggggcagggaggaaggggccatttctttaggaaaggagtctcagcttgctcactgtggtcagatgaaatgtgatttatctcttggtttctggtacctcagacctctgagacctgaggtgtattttgtctttggagatgagtccacccctgccccctcttagtccgttttcttctctgtgcccactcccctccttctctcccggcccatccctaggggctcgggtgacattctaacttctcacgggtactcagcccctttccctctgttttctccacagcaagccccgcccaacacggactggcgtttctctcaggcccagagacccggcaccagcgggtaggtgactgattctccagcccaccctcttctctgcggcattttctcagggatgacgtgggaggagatgggggagggcccagcatttgctacagatggcttctccctcagtttgagatcccagggaggtcttggtgtgcggggggctggcacacagaccccggaaggaagaggcgactgccctgactgttcaggaagctcaattcacatgcttgccccttccctcctcgccacgaccggcaccttttcctatcccctgagggcactgtggaaccaaaggatggtcttaagctggtctctgggtgaaagcgaggctttctatgcccatgtactgcctaaccccctcccctgagttgagctgggctccattatgacctggggctcaggcagaaaagcatttgaccggaggaggcggtccgcactcagcgcctcctccagagcctccagagccgaggctgactgcagcctggggagagtggaggcagcacagctggaggtggaactgaggaaggactgggcggggcatggagcaggcccccttctccggcccctcctcccactgtcctctgcccctacttgtcctgctctctgtctgtggggtctccgtgtctctgcccctttttcttgagtttccgtctttgccactttctcttacctctcagtccttccctcagtctctatctcgctttgcaatctctgcctctccctctcttctccatctctgtcttagcttccgtcttgattgctgcacctcagcctcagtccctttcatttgtctacttgcattgatctgtgccgcccactgtgcctgccatggcataagtgctcaataaatgtggagtgagtaactacacgggacccttagtctctttctccttctctatctctgcctccctgtccttgtcctggacctcttttctgtttctcctttcaccgtttcctagcgccttgtgttcttctatccccagcctctatgtttctctgtctctcactatttctgctttcctctctgttctttgtctctctttgtctctgtctctgtatatctttctttgtctctgtctctggtctctgtgcctgttgtctttttctgcctctttctctgttactctttctttatctctctttttcttttatcttgtcttttttctctgagcctctgtctctgtctctcatttttttgtgcttgtgggcaagccagcacacacaaccccccacccaccacccaccaacaccccgctctcttccttccctgcccctcacacactgagcctttgatcgcagctctccaccagacaccctcccatccaagcagccccagctgctcatttcaatctggtatgaattcctgctgagacaggaaccccctgcgggctgaaggggagggaaacttcagcagaaagaccttcagttggtctgagcagagtgggataggctctgcgccaggcctcccagttagaagtcaggagcctggaggagtctcagagcccagggagagaagcaggagcttgggccaccttaccctacctcctcaatggttgagtacttgctgtccacatttgccaagttgctacagatgctgagcttccaagagttatctttcccccatcctgcaaccaaccaaacccttgttgccacaaggacccaggagcccttggtgtatggcagagattccagcttctgggcatgcacagtcctgtcacccattttaggaacgcaaagcgcttcttagaaggcccctaaaaagcagcagatcaaaaggcttgggctgcccttgcccttcctttgaccccagctgttgtccttctccctgctggccttgccaaccttctcataagttatccattaagtcattaatgtattcattcgttcatttattcaacaaatatttatcgagcatctactatgagcagggccctgtgctaaacattgggctataggagtgaacaagtagatgtgatcccagaactcataggcttccagaccagcagaggagactgaaaatttgcaacaagtaacacttaaaaaaaaaaaaaaaggctgggcactgtggttcacgcctgtaatcccagcactttgggaggccaaggtgggtagatcacttgaggtcaggggtttgagaccagcctggcagccaacatggtgaaaccccatctcgattaaaaatacaaaaattagccaggcgtggtggcaggcacctgtaatcccagcgacttaggaggctgaggcagaactgcttgaacccggaaggcagaggttgcagtgagctgagatcacgaaaaaaaaataatctagccacaaatcacagtaagttctgagaggcagagaacaatgtgagtgtaatgggggggggaagatcagagaaggcttctaggaggaggtgacattgagaagttctaggccatttatgttccctctacctaccaccaccccaggccatacactggctttgaagcagaattcaccattgaacctggaagccccaccaactgcctctcatgtgtcctctggggtgagcaccttacccctgcctcaactcccattccatcaaatgagaggcttagtggcctggaatacatgtgggagctcttggagatatggaggagaaggtgcggaacctctctctctctcctctctctgcttccttagttaacttgtggaggatgcaacaaaccttttttttttttttttttagacagagtcttgctctgttgcccaagctggagtgcagtggtgcgatcttggctcactgcaacctctgcctgccaggttcaagcgattctcctgcctcagcctcccgagtagctgggacagcaggtgtgcaccaccacacccagctcatttttgtatttttagtagagatgggtttcgccacgttggccaggctggtttcaaactccccgacctcaactgatccacctgcttcagcttcccaaagtgctagaattacaggtgtgatcgcccccggccacaacaaacatttttgattcagcggctccaaagtgaaataagcgttaggatctagtccagtaacttcaacttctctccttcattcattcaacaaatggtcagtgagcactttctgttggccaggcagtgttctcgatgtgggaggcccctgccctcaaggagtttacagtgcactgaaggagacaaatattgaccaaataattacaaaaataaatgtgagactgaaactgtcataagtgctaggtagaattgtatctggtggtgtgggcgtataatagggatttgatttagggagcaggaggacatcctggaaatgaagttgtgctgagatctgaaagacaaatacaaattaaccagctaaagaaaagaaggaagagcattccagatggtcaggcataccagcttcaaagcagggctggtgttgagttcttcagtaaacttggttcaagatcaagccagctctgggtcacactgcctacacagaaggaagagcattccaaatgggaaaagcctatgcaaaagccttgtggtgaggcctcctgggatcaagggaatggcagggagttttctctttgctggcactggagtgaggggatgaagaggagaggttccttttatccagtctaaccctggttccagccttctgttgatgccctgcctcactccctccccaccatcttgcccactgccctccagcctggtctggtcagacacaccagcttcaaagcagggctagtattgagttcttcagtaaacttggttcaagttcaagtcagcactgggtcacactgcctagacagaaggaagaagacctggccaggtgtggtggctcacgcctgtaatcccagcactttgggaggctgaggtgggtggatcacctgaggtcaggagtttgagaccagcctggccaacatgatgaaaccccatctctagtaaaaatacaaaatattagccaggtgtggtggtgcacacctgtagtcccagctactcaggaggctgaggcaggggaatcgcttgaacccaggaggcggaggttgcagtgagctgagatcacaccactgcactccagtctgggtgacagagcgagactccatcaggaaagaaagaaagaaaaagagagagagggagggagggagggaaggaaggaaggaaggaaggaaggaaggaaggaaggaaggaaggaaggaaggaagaaaagaaagaaaaagggagaaaaaatgaagaagacttacattctgaagttcctgcttggcacatgcttctcctccccaccactatcccttctcaggtcatcctttgggtgtctgatcccaatagctgttgtctcaagctctgagcccagcaaaccatttcccccttcttaggctgtaacccaggccctgccctgcagctgtccccagcctctgcacaaagagtctccatttggtccctagactgttctctgatggctccacactaccatccctcctctgagagacagtatccctgctctctctcagtttgggcagtcattcaacaaacaaatagcaacttaatttttttccacttataaaatagtacatgctcattatagaaacatgaaaaatagaaaaaaaattaaaaggaaaaccacccatcattttacaatctagggagaaccaccaccaactacagtttaatatgaaacatttcaaatatgtacaaaagtagagagaatggtgtcatgaacctgtatgataccactatccagcttcaactaatgccttatcttgtttcacctatatccctacccttatcctgtccttggattcttttgaagcaaatctcagacatcatataatttcatcttggtctccaccatctttaacagatgacttttttttttttttttttttttggagacagagtctcactctcttgcccaggctgtggcacaatctcagctcactgcagccttcgcctcccgggttcaagcaattctcatgcttcagcctcctaagtagctaggattacaggtgtgcaccaccacacacagctaatattttgtattttcagtacaaacagggtttcgccatgttggccaggctggtcttgaactcctggcctcaagtgatccaccctcctcggcctcccaaaatgttgggattacaggtgtgagccaccttgcccggccagatgattctttcataaggtccacattttatatttgagtgagtgtctcttaagtatcttaatgctcttttaatgtaaaagacttcccctccatcttccatttttgcaatttatttgttgaatccctgccttttcatatatatctttctaaacttttctttgtgtaatcaaagaacatgcatgagcttcatttttatttttatttatttatttatttatttatttatttatttatttattgatacgtagccttgctctgtcacccaggctggactgcagtggcgcaatctcggctcactgcaagctccgcctcccaggttcacgccatgctcctgcctcagcctccagaatagctgggactacaggcgcccactaccacgcccggctaattattttgtatttttagtagagacggggtttcaccgtgttagccaggatggtctcgatctcctgacctcgtgatccgcccgcctcggcctcccaaagtgctgggattacaggcgtgagccaccgcgcctggccgagcttcattttaaaaaaatctcattcacctaaataagttgttcacaaacttgtcacactttcatgtgacactttattcacatattaagaactgttattcccagtcatacggtacatttcctactagttttttaaaaatagcaactgaggccatactgtccaacagaattatagcttttttcttctttgcagtgtatcatgagaatttccccatgtctttcaaaattcttcccaagtcatttgcagagtaactcctcttatgaatatacatattattttacagaataagtcctcatatgaatatacatattatttttctaatgctaatgggcttttgctacattagaaaacatacacattcatttacaattttttttttttgagacagtctcgctctgtctccaggctggggtgcagtggcgccatctcggctcactgcaagctccacctcctgggttcaagcaattctcctgcctcagcctcctgagtagctgggactacaggcacgcgccaccacgcccagctaatttttgtatttttagtagagacggggtttcaccatgttgaccaggatggtctcaatctcttgacctcgtgatccgcctgcctcagcctccctaagtgctgggattacaggtgggagccaccatccccagcctcatttacattttaacacaattaaattcagggtgttgtcagggtgacttcctagatttctcagttttttgagcatgatgtagggagtattttattatagtccagtctatgggatattcccttatacacacacacacacacacacacacacacacacacacacacacaccccaaactcaatagggcaagaaccatattcatcatctcttaaatcctaggtcctgtcacaggccactgcttggaaaatagttgactaaatgtagtccatttcttccatttttacttttcactattccccaaatcctggaagagtccctcatatctgctgctggggctccaaggcctccaagctgaagcccagtacgttgttgtgcataagatcataggccctggaatcatattaggctggctttcaggttgcaactctaccagttccagctgtgtgactctggtatagtctctcaacctctctgagccctgttttcatctgttggaaaatatagataatcacaacacttatctgcagggtgattccgaggataaaaaagacaaatatattacccagtcagcttagaataggaagctctcagtaaatggttaaaaaagaggtctctctccctctgctcatctcttacccagcttcacataattggcagcccacccacctgtttggccctcaaccttcaaccatttcccaggacgcctccttacactcctgatcatcatggttccaaccccactgttccactcagctttgttccctcaacaccactgctccctgtgacaggtcatcctcctaacctctggcatctggtcccgttgtctccctgacaacccgcatgctctcctccctgcaacccccgccgcttgcctgctctccctactttattcccattagcccccttcacctggggctgagaacacctggccttgaccctgcaccctcagccaggcccacagagctcagtcgggccggaagtaaggaccccagatattcagttgaggaatttaacattaatacaataatatagaatccaccagcagattttcataaatgttctgtgtgttcttttatccttttttttaatccaggattttatcaaggagcatagattgcatttggttgtcacgtctttcctctcctttaatctggagccagctcccagtctttttatttttttaatgacatggatatttttaaagagtccaggccagttgtactttaaaatgtccccgaacctggatttgctggctattctctgatggttagattcagattacacaccttggtaggaatacttcccgcagcatcacactgggactcatctaacgtcggcctgtcccactatcagtgatgccgagtttgttcgtgtggtaaaaacagtgtcccagatctctccattataaaaatatatttttataaagatattttaaaatatttgtgaaaatataagtaatctgtggatgatactttgagataggcagcaacccttcatgcaattttagtattccctgatgatccttgcctgtatctgtttttacatcagtgattacaaagcggtgatgttctgtcattccttctacatgtatttgctggtattcttctgaaaattacctggatgatttcttcagatttaaattcactgtcttttccttggggaagcctggactggctgagctgcctaaccctgactctctgtcttttttttttttttgacagggagtctagctctgttgccaggctggagtgcagtggcaaccttcacctcctgggttcaagcgattctcctgcctcagcctcccaagtagctgggattacaggcgtgtgccaccatgcccggttaattttttttttttaatatctattttagttgagacagggtttcaccatgttggtcagaatggtctcgatctcctgacctcgtggtctgcccgcccctgcctctcttcataccctctggtagcccctgacacagcccatggcaagtatcacaattgcaattactctattgtgtaattatttaaaatcagcctctcagtgcccaccatgagcaccgtaaagatggacagtttctatcatactcacagccacaaccccagcacctggctctgtgtctggtacatagaaattgctcaagaaagaattgttggaggggcgcggtggctcacgcctgtaattccagcactttgggaagcggaggcaggtggatcatgaggtcaggagttcgaaaccaacctggccaatatggtgaaaccccatctctactaaaaatacaaaaattcgctgggcatggtggcatgtgtgcacttgtcgtcccagctgctcaagaggctgaggcaggagaatcacttgaacctgggaggcagaggttgcagtgagccgagatcgcgccactgtactccagcctgggtgacagagcgagactccagctcaaaaaaaaaaaaaaaagaaaaaagaaaagaaataattattgaatcaatggaaacagaattacaactcttcccacttttgggaaggagaattgagattcctgctttccccttcaaccctagctttatgtttgttgtgatggtatagaggtcacacatggcagccttgtgtctgttcttaggctgagttcatctacttagggacggggaatcccagattgggcaaaaccaaaagcagggacagaccttggaaaaattgtaaagcagttcttggttgtgctcacccaccatgacaaaatatgcacacacacaacgcaacacacacacagacattttcatgccttcaaggcctaccctacagcctttcccatggtgccaaacccttcttcttaccttacagtcacttaactgtctctgctggtctcttcccactcatttaggcaacaaatatttattgaaaaacttctctgagccagatggtgccaaacagttacctaaagggcagactgtgtgtgtgccagggctgtttcccgccaacactcccctgcaaattgaaataatttcatccttggaaattcaaaaaaatcatgaaaattgtcactgtgggaaaattccaagtagagctgaaccttctaagaagcagagagttcttcttatggtttagtatttttttaaattatgaatcatttcatgttttttcaacactcggagtttctaaaagtctcacttaggtccaagtgctaggctttgtgctaggtgcttcagtaggaagcaggtggagtcgctgcctcacagaagccagtgtggtggaggaacagacaggcactacaacagctgcagtgtgactagtgccatgtggggcagccgctgggatgggagtacagtggaggcacctgcccagtctgagtggatctcctctgatatattttattcgtgtcatcatggcaaatgttgggggactggcattctagggaacaccatctgcccaggattcacagcaagagggaacttgagggataggaaagtgcaccttggaaaaggtttgatgatagagtgtttgagggcggggggtgggggttcttgtaaaataggaggggcaggttcttctatggccgtggattttactctgagggcttaggaagccattgaattttagaaatttcttctccctgctccagggtctcttggggcctcctacatctccccctaggtacctcctaggtccccactttttctctagctctggaacattctcttccatttcccaccttcacagtcctctggagaaggtctgatctccctcactatgacaggaagccaggctctctcatggtgggtgggggaatgcactatgttcaatgcattggaccagcctggccaacatggtgaaaccccgtctgtactaaaaatacaaaaattagcctggcacagtggcaggtgcctgtcatcccagctacttgggagactgaggcaggagaatcgcttgaacccaggaggtggatgttgcaatgagccaagatcgcgccactgcactccagcctggatgacagagtaagaccctgtctaaaacaaaaagaaaaaagcatcggaggcagcaaagagctggtttgagggactgacttgtgggattctggcttctgaaggattgtagaagtgcctcctaccttgctgagagaaacaggtcttgggcatggggtagggttagggtactaggtttgggagccctgggagaggacaggaggggcatgagctgtgccggcctgggagtctgtgctcaccatcctactctctccccagctcccaaaatggcgatgacaccggcacctggcccaacaaccagtttgacacagagatgctgcaagccatgatcttggcgtccgccagtggtaagtggtgtcagtgtgtgtatggaagagtgggagacctggggttctggggtgcatctcacagccaccatgcccacggactggatgtcaaacctgtgtagtttctccagatctttcggcaggtctgaaaggacccacaattccaaacataaagcctggaattgtggctaaggaacagcagaggggttgggggtcctgggatgcctggaggagagcgaacaaggaaaagactcatggagggaatagtggttacaagtctagctctggaatgggacagtgtagctcaggtcctagctctgctactatccttgggacttggatcgacttgctcaatctctctaaacctcagtttcctcagcctagaaagtggggacagggaccccaaagggttgttgtagagattaaatgagatgataccacaaagcatagagttctgggcctggcgcttggaagccctcaagcaatgaaagtgggtgtagaaatccccagccgagagaacacctcctctttatgcgaggctcctcttttgctgcccctaactccagagtaggattctggttttcccataaggttgactaagggcttcctttgtaatagagattcggctagtggtggttgtccctgaagagtcactagggcccagagcaggagaagaagaatatcatttgtccttaagagcacagcctaagctgggcgtggtggctcacgcctgtaatcccagcactttgggaagctgaggcaggaggatcatgaggtcaggagttcgaaaccggcctggccaacatagtgaaaccctgtctctactaaaaatacaaaaattagctgggcatggtggtgcgtgcctgtagtcccagctacttgggaggctgaggcaggagaatcgcttgaacctgggaggtggctgtggtgagcagaaaatcgcaccactgcactccagcctgggcaacagtctcgctctgtctcaaaaaaaaaaaaaaaaaaaaagagcacaggctttagaggcaggccaatctggattcaaatcctggcacctggcaccaccacttagcaatgagtccttaggtaagttattaaaccccctcggtttcacttactattaatgggcacagtattaacggatctcattgtggtgttaccagggccaaatgcaagtccctcagcacaggattggcagagagtaagggcacaatatattattatctttgctgacccaaacccgttttttactgggtagaaagcagaattagaataatgcctattaataaagactagcttctggagcagcaaatcctgggcttataaggaggctggcagaggatcaaggcattgccctatatcatgaactgatagccctgccctccagcatgtctggaggactggtgggtagagaaccaggtgaaatcacaagaagcactgtcatcacacctgggcacatactaaacaaactttaggggcctcctgtcaatgaatcctctcaatagctctgcaaggcaggtctgatttctcacactcgacagatgagagaaccgagaaggcacttgccccagggtcctcagttttgagctgccaagctgaggttctaacctggctcaactcctaagtttatgctctttctactatagggaccatggctgcctttggatccagcctcggcttctctattacctgagcaggatgagaggctgtcctcttcctcgagctctgctttattcttccagatcagggttgccagataaaatacaggatgcccagttacagttgaatgtcagataaacagcaagtactatttcagcataagtcagtctcaaatgttgcatgagacataatgtactaaaaaaaaaaatgctcattgtttacctgaaattcaaatttaactgggagccctgtacttttatttactaaatctggcaactctaccccagatgtctgtgaggttaagtggggccaggcctacagctgacggaaggacagagagagaggtggcagggactgctggcctcctgaggcagagctgtcccaggtctggtggggctatgattccagagaggccagagactgagtatgaaagtggcaggcggctgggtctgaggagatgccaagttggcctcttgagggaaataaacaggtatatttagctgttgtggccttgcgccctgaggccaggaagcagctttttagcctaaatccagatgttaaaaacagaaatgaaatcagtatttatggccccaaaccctccaagcaagtcatgcagctcgttcccctgtcaaggcctcccacctttggcccacacagggcctgaccctcgtctaagcctgcgccctggggaacggaccctgggggtggaggtggtgggtcaggccctgctctcactttcacacccgcttcctagccctgaaaccagagaggttcctgaagtccagcccagccaggcctgtggggctgctgagaggggttaagtaagagggagagtaaaaaccgacacttgggaggaggcttttaaaataaacatctgcggggagggatgctctcaaggaggctgcggtttgcagctcagccagctgtgttccagctaatcagcctccttgggctactctggagttgctgccttggccctgggatggggtaggttaagaggacagagggaggtcagggagctgggggctgagtttccctgagtagaggctggcacaggagagaaggcatcacccccacctcgtccaggccagaagatgtccagcttcttgaggctctcctaagtctgcctctcctgggaccaagagaaaatcccggtccttgaccaaggtgggccttggggggagtggggtgtagagggaggggcactggagaactgactctacagaaagtcaaagctggcaatccaacttcttcccctcagatttatagatgggaaaacaggcttgagccacgcagagacttgaccaagctcacacagttccttagtggcagagcagagcaaatattctctttcttttacattctggatttccatatcttctctccctcctggtccagcccaacctcagggcaccccccacgaggtgggcgggggatggctttgtcacttgcacccactcggggtgctactcagagatcttgggtgcacataggacgtgggtgggccgagcttctagctactccgtcaggcccttcctgtcattctgtctctgcctcccttctccctgcttctccgtgttcctcctcattcttttctgtgtgcagggagactacaccccccaccccgctctttctctggcgcctctgaggtcccccctctagcccctaaatcactctggaatcctggctctttgaagccagatctgggcccccctcccctaccccttccattcccaggctgggaaaggctgaagaggctgacggctggaggggagggggcggggcggtggcggatctggcttccttttggagttaattagggaaaacagagaaatgtcagcggaatgaaagggctgggggtgggggccagctggggtaggagaggaggaagtgggcagctgctccctcccactcaacccctctcccccgcccccagaaagctctcagctccggggatttgcgacatgaaatgggggctgtagaaacctgagcgctggtgcgtgaagagaaaaaccgaggcgcatcccggctctcccctcccgtgtgccctcctcctcttatgccggcttgaaaatatttcctgtctctctatttctcaatccctggttgatgtcccaggattactcagcctctccggctttagtcactctcgctacccgctcccagggtccagggtggaggcagagggaggctgggagagaagctctactgccagctgggcctgggctggcctgggcatccctgaggttttaactgtctcctaaccacagaggatctcagggcctccagcagcgagccccaatgagtcaaactcttgtttcctcctctcccacccccgacccagtcagggcaggtgaggggtagaggtgatggcatgctggatgtgacggtgttgatgatgtattgcacaggatgaagcaccatctcatttagtcctcacagcagccttcacagtgcgtacaaatcagctggcaattccgagaggctgcattctaaacaagttcctgggtgatgctgagccagggccagagtgtggacttctctgggccccagtttcttcttctgtacagtgggacgttggactggaggtgctgtctgatgtcacctagctgtggcactctgagcctgtgcctaaagtgtccctgagatgtctagtccccgagatcatcatctcctcagcttcatagagccgagctcttctccatcttctctctacctcccattcactcagaacagggataaggtccaagctgctggtggtgatggtgactgactgtcccttccagcatgcgcttaggtacacttgggcctgaatgcccctctaacaaatgctaccgggtatggccttggtccttctaacacttggttccctcatctgtaaaatgagggtcataccacatagctggctgggctgttatgtagaggttaaaagtgattgtgcatgtgaagcatccagcagagtgcctggcacacagtaggtgctcaaatgctgttttgaaatacaaaaattagctgggctagtggtgtgcacctgtaatctcagctactcaggaggttgaggcaggagaatcacttgagcccaggaggcagaggttgcagtgagccgggatcgcgccactgcactccaggctgggcgacagagcaggactccatcttaaaaaaaaaaaaaaaaaaatgctgttttgaaatggaggcttggaagagcactcttcacccccaccccacacacttactaacggaactaccgaatctctactcgtgccaggccttgcttggcaaaggctaggggcatgtaaagccatggtttcatggctgctgccctccaggagcccatggtctagtgtgggagtcagaggctcccttgagaaagccagggcaaggaactgagagcccgtgtcacagccctgagagaaataccagcgaatgtgttttgagcacttacatctaccaggcactattttacgtacctgacatacattttcttatttagcattcactaaaaccagaagaggtggttaccattatcatccccattttgcagatgagaaaactgaagtggcataaggaggttaggtagacttgcccaggatcacagtgagtaaggaaaggagctaggaatcaaacctagactttctcactccagagcctcttaacctctaccctcaactcttgtgaagagagactaccttggtgacccctatattcccagtgctcagcgtggtcaaggcccagggtgctgtataggcattcattaactgctggggatataagacagtgactgttgaggaccctaagtttagctcccacctgatcttcctctgtctctgcagaagctgctgatgggagctccaccctgggagggggtgccggcaccatgggattgagcgcccgctacggaccccagttcaccctgcagcacgtgcccgactaccgccagaatgtctacatcccaggcagcaatgccacactgaccaacgcagctggcaagcgggatggcaaggccccagcaggtggcaatggcaacaagaagaagtcgggcaagaaggagaagaagtaacatggaggccaggccaagagccacagggcggcctctccccaaccagcccagcttctccttacctgcacccaggcctcagagtttcagggctaacccccagaatactggtaggggccaaggccatgctccccttgggaaacagaaacaagtgcccagtcagcacctaccccttcccccccagggggttgaatatgcaaaagcagttccgctgggaacccccatccaatcaactgctgtacccatgggggtagtggggttactgtagacaccaagaaccatttgccacaccccgtttagttacagctgaactcctccatcttccaaatcaatcaggcccatccatcccatgcctccctcctccccaccccactccaacagttcctctttcccgagtaaggtggttggggtgttgaagtaccaagtaacctacaagcctcctagttctgaaaagttggaagggcatcatgacctcttggcctctcctttgattctcaatcttcccccaaagcatggtttggtgccagccccttcacctccttccagagcccaagatcaatgctcaagttttggaggacatgatcaccatccccatggtactgatgcttgctggatttagggagggcattttgctaccaagcctcttcccaacgccctggggaccagtcttctgttttgtttttcattgtttgacgtttccactgcatgccttgacttcccccacctcctcctcaaacaagagactccactgcatgttccaagacagtatggggtggtaagataaggaagggaagtgtgtggatgtggatggtgggggcatggacaaagcttgacacatcaagttatcaaggccttggaggaggctctgtatgtcctcaggggactgacaacatcctccagattccagccataaaccaataactaggctggacccttcccactacataatagggctcagcccaggcagccagctttgggctgagctaacaggaccaatggattaaactggcatttcagtccaaggaagctcgaagcaggtttaggaccaggtccccttgagaggtcagaggggcctctgtgggtgctgggtactccagaggtgccactggtggaagggtcagcggagccccagcaggaagggtgggccagccaggccattcttagtccctgggttggggaggcagggagctagggcagggaccaaatgaacagaaagtctcagcccaggatggggcttcttcaacagggcccctgccctcctgaagcctcagtccttcaccttgccaggtgccgtttctcttccgtgaaggccactgcccaggtccccagtgcgccccctagtggccatagcctggttaaagttccccagtgcctccttgtgcatagaccttcttctcccacccccttctgcccctgggtccccggccatccagcggggctgccagagaaccccagacctgcccttacagtagtgtagcgccccctccctctttcggctggtgtagaatagccagtagtgtagtgcggtgtgcttttacgtgatggcgggtgggcagcgggcggcgggctccgcgcagccgtctgtccttgatctgcccgcggcggcccgtgttgtgttttgtgctgtgtccacgcgctaaggcgaccccctcccccgtactgacttctcctataagcgcttctcttcgcatagtcacgtagctcccaccccaccctcttcctgtgtctcacgcaagttttatactctaatatttatatggctttttttcttcgacaaaaaaataataaaacgtttcttctgaaaagctgaacgtttctgtataagcgatggaagctcctggcatgtgtgcatgaagtgatgagctgaggtgggtgctggaagaagggcggaatcgggaggccactttgtgtcattgcgcgtctagatgtttccgaattgcgtgtgtgtgtgtgactgtgcaatatggttgtgtatgcttgcaatgccgttgtgcctatgagacagtgtgcgattgtgtgcctatggatctgtgtaccgtgtgccattgtgtgatcggtccgctgtgggggtggggatctgagtgcggcgtgtcagtgtgcagtggagtgtgcagtctaagcttgcggctgtctccaggcagaagaggagaccccggcgcgggcgggggcgggttggcgccgggcaaacgccttgggtagaggggagaggacgtttcgttagttcccgccccttcctgactaaaattgcctacccgaagcgccccggagggcttcacgggaggagggtagactctcctttgcccccgcacccccacccccgctgcctaggggttttgggaaagccgcgggagtgggagggaatgcgggaggtgattcttccaaagccaagtctgcagctcgagcctcagtttccccatctggaattcgccttcccgctgacatctccgtagcgaagcctaagaaattggagggctcatcctcttcttgcgggggtcaaggggactgaaaggacgtgcaggaaatgagatccatcgcagactcagctcccctccctccttcctgtcggtgcttttccactcactcgcctgctctcccatctccccgccccctccgcctgcctcctcgaagcactgtgggattccgaggttgctgcagccagagaagctgcagaaaaacacggagctgggggtgaagggggacttaaaaggggaactacccggaaggacccaagaacacaaagacagagccactgcggttatctggctggtcagcaagggtatgcggcttcctccgcgctgcggaggctcccagagccaggtcacccattctgccagctcaagtctgttgtcatgggaaccaaaccttccaacttaagaatctgggggcgactttctagcgtgggaggaagggtggtgtgcacggttgctgagatggaagcagggttttgttactcagagccaggctgcggaggggcggggtgccgggcgcctgggttctattccaggcacagcagcagactggcagagcgcgtgagcagctgtggtttgtcccctaattggtatgtgtgcctataaagctctgaaccagaaaggcgtggcctccggggggacgggagggaggcggcaggcaacccatccccacacctcaggccatactgaggaggcagctgcccaggctccagggctatttaaaaggcttttatttccagttccagagcccgcccgaatgggtttgtggtcctctccaggcctctccctgtctatcctgggcctgctcattgctggtctggcttttttgtgcaggtcataacg
